(19) United States
(12) Patent Application Publication
(10) Pub. No.: US 2017/0356903 A1
(43) Pub. Date: Dec. 14, 2017

(54) OLIGONUCLEOTIDE PROBES AND USES THEREOF

(71) Applicant: Caris Science, Inc., Irving, TX (US)

(72) Inventors: Valeriy DOMENYUK, Phoenix, AZ (US); Andrew HUNTER, Charleston, SC (US); Heather O'NEILL, Mesa, AZ (US); David SPETZLER, Paradise Valley, AZ (US)

(21) Appl. No.: 15/528,417

(22) PCT Filed: Nov. 23, 2015
(86) PCT No.: PCT/US15/62184

§ 371 Date: May 19, 2017

Related U.S. Application Data
(60) Provisional application No. 62/083,060, filed on Nov. 21, 2014.
(60) Provisional application No. 62/099,946, filed on Jan. 5, 2015.
(60) Provisional application No. 62/115,531, filed on Feb. 12, 2015.
(60) Provisional application No. 62/126,308, filed on Feb. 27, 2015.
(60) Provisional application No. 62/130,514, filed on Mar. 9, 2015.
(60) Provisional application No. 62/149,663, filed on Apr. 20, 2015.
(60) Provisional application No. 62/161,181, filed on May 13, 2015.
(60) Provisional application No. 62/167,406, filed on May 28, 2015.
(60) Provisional application No. 62/169,383, filed on Jun. 1, 2015.
(60) Provisional application No. 62/186,242, filed on Jun. 29, 2015.
(60) Provisional application No. 62/198,110, filed on Jul. 28, 2015.
(60) Provisional application No. 62/220,652, filed on Sep. 18, 2015.
(60) Provisional application No. 62/239,226, filed on Oct. 8, 2015.

(51) Int. Cl. G01N 33/53; C12Q 1/68; C12N 15/113; G01N 33/574; G01N 33/564; G01N 33/68; C12N 15/115

(52) U.S. Cl. CPC G01N 33/5308; G01N 33/6893; C12Q 1/6876; C12N 15/115; C12Q 1/6886; G01N 33/6896; G01N 33/574; G01N 33/564; C12N 15/113; C12Q 1/6883; C12Q 2600/178; C12N 2310/16; C12N 2320/10; C12N 2310/113

(57) ABSTRACT

Methods and compositions are provided to identify oligonucleotide probes that can detect various targets of interest. The targets include microvesicles, microvesicle antigens, and nucleic acids. The target detection may be used to provide a diagnosis, prognosis or theranosis of a medical condition, a disease or a disorder.

### CROSS REFERENCE

[0001] This application claims the benefit of U.S. Provisional Patent Application Nos. 62/083,060, filed Nov. 21, 2014; 62/099,946, filed Jan. 5, 2015; 62/115,531, filed Feb. 12, 2015; 62/126,308, filed Feb. 27, 2015; 62/130,514, filed Mar. 9, 2015; 62/149,663, filed Apr. 20, 2015; 62/161,181, filed May 13, 2015; 62/167,406, filed May 28, 2015; 62/169,383, filed Jun. 1, 2015; 62/220,652, filed Sep. 18, 2015; 62/239,226, filed Oct. 8, 2015; 62/186,242, filed Jun. 29, 2015; 62/198,110, filed Jul. 28, 2015; all of which applications are incorporated herein by reference in their entirety. This application is related to International Patent Application No. PCT/US2014/053306, filed Aug. 28, 2014; which application claims the benefit of U.S. Provisional Patent Application Nos. 61/871,107, filed Aug. 28, 2013; 61/874,621, filed Sep. 6, 2013; 61/900,975, filed Nov. 6, 2013; 61/912,471, filed Dec. 5, 2013; 61/924,192, filed Jan. 6, 2014; 61/949,216, filed Mar. 6, 2014; 61/974,949, filed Apr. 3, 2014]; 61/990,085, filed May 7, 2014; 61/994,704, filed May 16, 2014; and 62/024,436, filed Jul. 14, 2014; all of which applications are incorporated herein by reference in their entirety.

### SEQUENCE LISTING SUBMITTED VIA EFS-WEB

[0002] The entire content of the following electronic submission of the sequence listing via the USPTO EFS-WEB server, as authorized and set forth in MPEP §1730 II.B.2(a), is incorporated herein by reference in its entirety for all purposes. The sequence listing is within the electronically filed text file that is identified as follows:

[0003] File Name: 37901820602SeqList.txt

[0004] Date of Creation: Nov. 23, 2015

[0005] Size (bytes): 1,915,555 bytes

### BACKGROUND OF THE INVENTION

[0006] The invention relates generally to the field of aptamers capable of binding to microvesicle surface antigens, which are useful as therapeutics in and diagnostics of cancer and/or other diseases or disorders in which microvesicles are implicated. The invention further relates to materials and methods for the administration of aptamers capable of binding to microvesicles. The microvesicles may be derived from cells indicative of cancer, e.g., a breast cancer.

[0007] Aptamers are oligomeric nucleic acid molecules having specific binding affinity to molecules, which may be through interactions other than classic Watson-Crick base pairing. Unless otherwise specified, an “aptamer” as the term is used herein can refer to nucleic acid molecules that can be used to characterize a phenotype, regardless of manner of target recognition. The terms aptamer, oligonucleotide, polynucleotide, or the like may be used interchangeably herein.

[0008] Aptamers, like peptides generated by phage display or monoclonal antibodies (“mAbs”), are capable of specifically binding to selected targets and modulating the target's activity, e.g., through binding aptamers may block their target's ability to function. Created by an in vitro selection process from pools of random sequence oligonucleotides, aptamers have been generated for over 100 proteins including growth factors, transcription factors, enzymes, immunoglobulins, and receptors. A typical aptamer is 10-15 kDa in size (30-45 nucleotides), binds its target with sub-nanomolar affinity, and discriminates against closely related targets (e.g., aptamers will typically not bind other proteins from the same gene family). A series of structural studies have shown that aptamers are capable of using the same types of binding interactions (e.g., hydrogen bonding, electrostatic complementarity, hydrophobic contacts, steric exclusion) that drive affinity and specificity in antibody-antigen complexes.

[0009] Aptamers have a number of desirable characteristics for use as therapeutics and diagnostics including high specificity and affinity, biological efficacy, and excellent pharmacokinetic properties. In addition, they offer specific competitive advantages over antibodies and other protein biologics, for example:

[0010] Speed and control. Aptamers are produced by an entirely in vitro process, allowing for the rapid generation of initial leads, including therapeutic leads. In vitro selection allows the specificity and affinity of the aptamer to be tightly controlled and allows the generation of leads, including leads against both toxic and non-immunogenic targets.

[0011] Toxicity and Immunogenicity. Aptamers as a class have demonstrated little or no toxicity or immunogenicity. In chronic dosing of rats or woodchucks with high levels of aptamer (10 mg/kg daily for 90 days), no toxicity is observed by any clinical, cellular, or biochemical measure. Whereas the efficacy of many monoclonal antibodies can be severely limited by immune response to antibodies themselves, it is extremely difficult to elicit antibodies to aptamers most likely because aptamers cannot be presented by T-cells via the MHC and the immune response is generally trained not to recognize nucleic acid fragments.

[0012] Administration. Whereas most currently approved antibody therapeutics are administered by intravenous infusion (typically over 2-4 hours), aptamers can be administered by subcutaneous injection (aptamer bioavailability via subcutaneous administration is >80% in monkey studies (Tucker et al., J. Chromatography B. 732: 203-212, 1999)). This difference is primarily due to the comparatively low solubility and thus large volumes necessary for most therapeutic mAbs. With good solubility (>150 mg/mL) and comparatively low molecular weight (aptamer: 10-50 kDa; antibody: 150 kDa), a weekly dose of aptamer may be delivered by injection in a volume of less than 0.5 mL. In addition, the small size of aptamers allows them to penetrate into areas of conformational constrictions that do not allow for antibodies or antibody fragments to penetrate, presenting yet another advantage of aptamer-based therapeutics or prophylaxis.

[0013] Scalability and cost. Aptamers are chemically synthesized and are readily scaled as needed to meet production demand for diagnostic or therapeutic applications. Whereas difficulties in scaling production are currently limiting the availability of some biologics and the capital cost of a large-scale protein production plant is enormous, a single large-scale oligonucleotide synthesizer can produce upwards of 100 kg/year and requires a relatively modest initial investment. The current cost of goods for aptamer synthesis at the kilogram scale is estimated at $100/g, comparable to that for highly optimized antibodies.

[0014] Stability. Aptamers are chemically robust. They are intrinsically adapted to regain activity following exposure to factors such as heat and denaturants and can be stored for extended periods (>1 yr) at room temperature as lyophilized powders.

### INCORPORATION BY REFERENCE

[0015] All publications, patents and patent applications mentioned in this specification are herein incorporated by reference to the same extent as if each individual publication, patent or patent application was specifically and individually indicated to be incorporated by reference.

### SUMMARY OF THE INVENTION

[0016] Compositions and methods of the invention provide aptamers that bind biomarkers of interest such as microvesicle surface antigens or functional fragments of microvesicle surface antigens. In various embodiments, aptamers of the invention are used in diagnostic, prognostic or theranostic processes to screen a biological sample for the presence or levels of microvesicle surface antigens determined to provide a diagnostic readout. The diagnosis may be related to a cancer, e.g., a breast cancer.

[0017] In other embodiments, aptamers of the invention are chemically modified or composed in a pharmaceutical composition for therapeutic applications.

[0018] In an embodiment, the invention provides an oligonucleotide probe comprising an anti-miR complementary sequence according to any one of SEQ ID NO. 2765-5352. The Sequence Listing notes the appropriate microRNA for each probe. The invention also provides an anti-miR mismatch sequence according to any one of SEQ ID NO. 5353-7940. The Sequence Listing also notes the appropriate microRNA for each control probe.

[0019] The oligonucleotide probes can be surrounded by at least one flanking sequence. The flanking sequence can be chosen to provide various functionalities to a probe construct. For example, the flanking sequence may serve as a primer for amplification or sequencing, or for probe identification, capture, labeling and other detection schemes. In some embodiments, the oligonucleotide probe comprises the sequence 5′-CTAGCATGACTGCAGTACGT [spacer] [anti-miR] CTGTCTCTTATACACATCTGACGCTGCCGACGA-3′ , wherein the spacer comprises at least one nucleotide and wherein the [anti-miR] sequence is complementary to a microRNA. If desired, the spacer can be varied in length according to the length of the anti-miR sequence such that all members of a mixture of oligonucleotide probes are of the same length. Such schemes are described in Table 20 or Table 21 and accompanying text. The spacer can also be included 3′ of the anti-miR, or spacers can be included around both sides of the anti-miR within the contruct. The anti-miR section can be designed to be complementary to any known microRNA of interest. For example, the anti-miR section can be complementary to a human microRNA, e.g., a human microRNA as shown herein in any one of SEQ ID NO. 177-2764. In some embodiments, the anti-miR sequence comprises an anti-miR complementary sequence according to any one of SEQ ID NO. 2765-5352. Control probes can be constructed that are not cleaved by the protein. Such control probes may comprise an anti-miR mismatch sequence selected from any one of SEQ ID NO. 5353-7940.

[0020] In other embodiments, the oligonucleotide probe comprises the sequence 5′ GATCTCCTGTCATCTCACCT [anti-miR] TGTAGAACCATGTCGTCAGTGT 3′. The anti-miR section can be designed to be complementary to any known microRNA of interest. For example, the anti-miR section can be complementary to a human microRNA, e.g., a human microRNA as shown herein in any one of SEQ ID NO. 177-2764. In some embodiments, the anti-miR sequence comprises an anti-miR complementary sequence according to any one of SEQ ID NO. 2765-5352. Control probes can be constructed that are not cleaved by the protein. Such control probes may comprise an anti-miR mismatch sequence selected from any one of SEQ ID NO. 5353-7940.

[0021] The invention further provides an oligonucleotide that is at least 50, 55, 60, 65, 70, 75, 80, 85, 90, 95, 96, 97, 98, 99 or 100 percent homologous to an oligonucleotide sequence described above. In some cases, mismatches in the anti-miR portions can allow promiscuity in the recognition of the probes by a protein-nucleic acid complex, such as an Ago2-microRNA complex. Thus, the anti-miR may contain at least 1, 2, 3, 4, 5, 6, 7, 8, 9, 10, 11, 12, 13, 14, 15, 16, 17, 18, 19, 20 or more mismatches compared to the complementary microRNA sequence as desired, e.g., up to the point that base pairing and/or cleavage no longer occur. For partially complementary microRNAs to recognise their target nucleic acids, a section of the microRNA referred to as the “seed region,” e.g., nucleotides 2-7 of the miRNA may need to be perfectly complementary. However, pairing of the seed region alone may not offer enough pairing to induce cleavage of the microRNA targets such as mRNAs. See, e.g., Ellwanger D C, et al (2011). The sufficient minimal set of miRNA seed types. Bioinformatics 27:1346-50, which reference is incorporated by reference herein in its entirety.

[0022] The invention also provides a plurality of oligonucleotides comprising at least 1, 2, 3, 4, 5, 6, 7, 8, 9, 10, 11, 12, 13, 14, 15, 16, 17, 18, 19, 20, 25, 30, 40, 45, 50, 55, 60, 65, 70, 75, 80, 85, 90, 95, 100, 125, 150, 175, 200, 300, 400, 500, 600, 700, 800, 900, 1000, 2000, 3000, 4000, 5000, 6000, 7000, 8000, 9000, or at least 10000 different oligonucleotide sequences as described above. For example, such mixtures can be designed to query the presence of all known microRNA, or of a subset directed to query certain microRNA complexes of interest. The plurality of oligonucleotides may comprise a nucleic acid sequence or a portion thereof that is at least 50, 55, 60, 65, 70, 75, 80, 85, 90, 95, 96, 97, 98, 99 or 100 percent homologous to the specific oligonucleotides directed above.

[0023] The oligonucleotide or plurality of oligonucleotides may comprise either DNA and/or RNA. Ago2 is able to cleave either DNA or RNA bound to the loaded microRNA. In some cases, DNA may be preferred. For example, DNA may be inherently more stable in biological samples which may comprise various RNAses. The oligonucleotide or plurality of oligonucleotides may also comprise various modifications as desired. For example, oligonucleotide or plurality of oligonucleotides may have at least one functional modification selected from the group consisting of biotinylation, a non-naturally occurring nucleotide, a deletion, an insertion, an addition, and a chemical modification. Other nucleic acid modification disclosed herein or known in the art may be used as desired.

[0024] In a related aspect, the invention provides a composition comprising an oligonucleotide or plurality of oligonucleotides as above. The composition can include various components, e.g., the composition may comprise a buffer and/or a stabilizing agent.

[0025] In an aspect, the invention provides a method of detecting at least one microRNA-protein complex in a sample comprising: a) contacting the sample with at least one oligonucleotide capable of binding a microRNA in a complex between the microRNA and a protein molecule; and b) identifying cleavage of the at least one oligonucleotide in the contacted sample, thereby detecting the at least one microRNA-protein complex in the sample. The at least one oligonucleotide can be an oligonucleotide or plurality of oligonucleotides as described above. The at least one oligonucleotide may comprises a 5′ flanking region, a core region configured 5′ of the flanking region, and a 3′ flanking region configured 5′ of the core region, wherein the at least one oligonucleotide is configured to be cleaved within the core region by a protein component of the at least one microRNA-protein complex if the oligonucleotide is fully or partially complementary to the microRNA component of the at least one microRNA-protein complex. See, e.g., FIG. 14A.

[0026] The microRNA can be from any source of interest, including an animal or plant source. In an embodiment, the microRNA a human microRNA. For example, human microRNA can be as shown herein in any one of SEQ ID NO. 177-2764 or as described in the miRbase database (available at www.mirbase.org). In some embodiments, the microRNA comprises at least one of let-7a, miR-16, miR-21 or miR-92a. The protein within the at least one microRNA-protein complex can be a nucleic acid binding protein. In some embodiments, the protein comprises an Argonaute protein, Ago2, Ago1, Ago3 or Ago 4. The method of the invention may further comprise addition of a chelating agent prior to the contacting step and addition of magnesium after the contacting step. Addition of the chelating agent, e.g., EDTA, may inhibit cleavage events. Later addition of magnesium may then allow cleavage to proceed. Thus, this additional step can be used to control cleavage events as desired.

[0027] Cleavage of the at least one oligonucleotide can be identified by detecting cleaved and/or non-cleaved products of the at least one oligonucleotide. Any useful method of detecting such products can be used. For example, the cleaved and/or non-cleaved products can be detected by sequencing, amplification, hybridization, and/or via a detectable label. Detection by hybridization may comprise contacting the cleaved and/or non-cleaved products with at least one labeled probe that is configured to hybridize with at least one cleaved and/or non-cleaved product. The label can be any appropriate detectable label, e.g., as described elsewhere herein or known in the art. In some embodiments, the label comprises a fluorescent label. Useful systems include the nCounter nucleic acid detection system from NanoString Technologies, Inc. (Seattle, Wash.). The detection by hybridization can also include detecting hybridization to a planar array (e.g., a microarray) or particle array (e.g., a microbead array).

[0028] The cleaved and/or non-cleaved products can also be detected by size. Size can be determined using any useful technique. For example, the size can be determined via gel electrophoresis or chromatography.

[0029] The cleaved and/or non-cleaved products can be detected by sequencing. Sequencing can be performed using any useful technique. For example, the sequencing may be next generation sequencing, dye termination sequencing and/or pyrosequencing.

[0030] The cleaved and/or non-cleaved products can be detected using a label. Any useful labeling system can be used. One such system comprises a molecular beacon system, e.g., as shown in FIG. 15A. In such a system, the 5′ end of the at least one oligonucleotide carries a fluorescent label and the 3′ end of the oligonucleotide carries a fluorescent quencher. Alternately, the 3′ end of the at least one oligonucleotide carries a fluorescent label and the 5′ end of the oligonucleotide carries a fluorescent quencher. As shown in FIG. 15A, the fluorescent label is detectable upon cleavage of the at least one oligonucleotide by the protein component of the at least one microRNA-protein complex. A molecular beacon can be designed using structure prediction. See, e.g., Example 23.

[0031] In some embodiments of the method, the microRNA-protein complex is associated with a microvesicle in the sample. For example, the microRNA-protein complex may be payload within a microvesicle. In that case, the microvesicle can be lysed prior to the contacting step. Alternately, the microRNA-protein complex may be associated with the outer surface of the microvesicle. For example, the protein may be a surface antigen.

[0032] The method of the invention can be used to characterize a phenotype. The phenotype may be any detectable phenotype, e.g., a condition, disease or disorder. In such cases, the characterizing can include without limitation providing diagnostic, prognostic and/or theranostic information for the disease or disorder. In the methods of the invention, the characterizing may comprise comparing a presence or level of the detected at least one microRNA-protein complex to a reference level. The reference can be any useful level. In some embodiments, the reference comprises a presence or level of the at least one microRNA-protein complex in a sample from an individual without the disease or disorder.

[0033] The sample assessed according to the method can be a biological sample. For example, the biological sample may be a bodily fluid, tissue sample or cell culture. In some embodiments, the bodily fluid comprises peripheral blood, sera, plasma, ascites, urine, cerebrospinal fluid (CSF), sputum, saliva, bone marrow, synovial fluid, aqueous humor, amniotic fluid, cerumen, breast milk, broncheoalveolar lavage fluid, semen, prostatic fluid, cowper's fluid or pre-ejaculatory fluid, female ejaculate, sweat, fecal matter, hair oil, tears, cyst fluid, pleural and peritoneal fluid, pericardial fluid, lymph, chyme, chyle, bile, interstitial fluid, menses, pus, sebum, vomit, vaginal secretions, mucosal secretion, stool water, pancreatic juice, lavage fluids from sinus cavities, bronchopulmonary aspirates, blastocyl cavity fluid, or umbilical cord blood. Plasma and serum may be preferred for some applications.

[0034] The sample can be from a subject suspected of having or being predisposed to a disease or disorder. The disease or disorder can be any disease or disorder that can be assessed by the subject method. For example, the disease or disorder may be a cancer, a premalignant condition, an inflammatory disease, an immune disease, an autoimmune disease or disorder, a pregnancy related disorder, a cardiovascular disease or disorder, a neurological disease or disorder, an infectious disease or pain. In an embodiment, the cancer comprises an acute lymphoblastic leukemia; acute myeloid leukemia; adrenocortical carcinoma; AIDS-related cancers; AIDS-related lymphoma; anal cancer; appendix cancer; astrocytomas; atypical teratoid/rhabdoid tumor; basal cell carcinoma; bladder cancer; brain stem glioma; brain tumor (including brain stem glioma, central nervous system atypical teratoid/rhabdoid tumor, central nervous system embryonal tumors, astrocytomas, craniopharyngioma, ependymoblastoma, ependymoma, medulloblastoma, medulloepithelioma, pineal parenchymal tumors of intermediate differentiation, supratentorial primitive neuroectodermal tumors and pineoblastoma); breast cancer; bronchial tumors; Burkitt lymphoma; cancer of unknown primary site; carcinoid tumor; carcinoma of unknown primary site; central nervous system atypical teratoid/rhabdoid tumor; central nervous system embryonal tumors; cervical cancer; childhood cancers; chordoma; chronic lymphocytic leukemia; chronic myelogenous leukemia; chronic myeloproliferative disorders; colon cancer; colorectal cancer; craniopharyngioma; cutaneous T-cell lymphoma; endocrine pancreas islet cell tumors; endometrial cancer; ependymoblastoma; ependymoma; esophageal cancer; esthesioneuroblastoma; Ewing sarcoma; extracranial germ cell tumor; extragonadal germ cell tumor; extrahepatic bile duct cancer; gallbladder cancer; gastric (stomach) cancer; gastrointestinal carcinoid tumor; gastrointestinal stromal cell tumor; gastrointestinal stromal tumor (GIST); gestational trophoblastic tumor; glioma; hairy cell leukemia; head and neck cancer; heart cancer; Hodgkin lymphoma; hypopharyngeal cancer; intraocular melanoma; islet cell tumors; Kaposi sarcoma; kidney cancer; Langerhans cell histiocytosis; laryngeal cancer; lip cancer; liver cancer; lung cancer; malignant fibrous histiocytoma bone cancer; medulloblastoma; medulloepithelioma; melanoma; Merkel cell carcinoma; Merkel cell skin carcinoma; mesothelioma; metastatic squamous neck cancer with occult primary; mouth cancer; multiple endocrine neoplasia syndromes; multiple myeloma; multiple myeloma/plasma cell neoplasm; mycosis fungoides; myelodysplastic syndromes; myeloproliferative neoplasms; nasal cavity cancer; nasopharyngeal cancer; neuroblastoma; Non-Hodgkin lymphoma; nonmelanoma skin cancer; non-small cell lung cancer; oral cancer; oral cavity cancer; oropharyngeal cancer; osteosarcoma; other brain and spinal cord tumors; ovarian cancer; ovarian epithelial cancer; ovarian germ cell tumor; ovarian low malignant potential tumor; pancreatic cancer; papillomatosis; paranasal sinus cancer; parathyroid cancer; pelvic cancer; penile cancer; pharyngeal cancer; pineal parenchymal tumors of intermediate differentiation; pineoblastoma; pituitary tumor; plasma cell neoplasm/multiple myeloma; pleuropulmonary blastoma; primary central nervous system (CNS) lymphoma; primary hepatocellular liver cancer; prostate cancer; rectal cancer; renal cancer; renal cell (kidney) cancer; renal cell cancer; respiratory tract cancer; retinoblastoma; rhabdomyosarcoma; salivary gland cancer; Sezary syndrome; small cell lung cancer; small intestine cancer; soft tissue sarcoma; squamous cell carcinoma; squamous neck cancer; stomach (gastric) cancer; supratentorial primitive neuroectodermal tumors; T-cell lymphoma; testicular cancer; throat cancer; thymic carcinoma; thymoma; thyroid cancer; transitional cell cancer; transitional cell cancer of the renal pelvis and ureter; trophoblastic tumor; ureter cancer; urethral cancer; uterine cancer; uterine sarcoma; vaginal cancer; vulvar cancer; Waldenström macroglobulinemia; or Wilm's tumor. The premalignant condition can be Barrett's Esophagus. The autoimmune disease can be inflammatory bowel disease (IBD), Crohn's disease (CD), ulcerative colitis (UC), pelvic inflammation, vasculitis, psoriasis, diabetes, autoimmune hepatitis, multiple sclerosis, myasthenia gravis, Type I diabetes, rheumatoid arthritis, psoriasis, systemic lupus erythematosis (SLE), Hashimoto's Thyroiditis, Grave's disease, Ankylosing Spondylitis Sjogrens Disease, CREST syndrome, Scleroderma, Rheumatic Disease, organ rejection, Primary Sclerosing Cholangitis, or sepsis. The cardiovascular disease can be atherosclerosis, congestive heart failure, vulnerable plaque, stroke, ischemia, high blood pressure, stenosis, vessel occlusion or a thrombotic event. The neurological disease can be Multiple Sclerosis (MS), Parkinson's Disease (PD), Alzheimer's Disease (AD), schizophrenia, bipolar disorder, depression, autism, Prion Disease, Pick's disease, dementia, Huntington disease (HD), Down syndrome, cerebrovascular disease, Rasmussen's encephalitis, viral meningitis, neurospsychiatric systemic lupus erythematosus (NPSLE), amyotrophic lateral sclerosis, Creutzfeldt-Jacob disease, Gerstmann-Straussler-Scheinker disease, transmissible spongiform encephalopathy, ischemic reperfusion damage (e.g. stroke), brain trauma, microbial infection, or chronic fatigue syndrome. The pain can be fibromyalgia, chronic neuropathic pain, or peripheral neuropathic pain. The infectious disease can be a bacterial infection, viral infection, yeast infection, Whipple's Disease, Prion Disease, cirrhosis, methicillin-resistant staphylococcus aureus, HIV, HCV, hepatitis, syphilis, meningitis, malaria, tuberculosis, influenza.

[0035] As further described herein, the invention provides a kit comprising a reagent for carrying out the method. Similarly, the invention provides for the use of a reagent for carrying out the method. The reagent can be any useful reagent for carrying out the method. For example, the reagent can be an oligonucleotide or plurality of oligonucleotides and/or a composition as described above.

[0036] In an aspect, the invention provides a method of enriching a plurality of oligonucleotides, comprising: (a) contacting a first microvesicle population with the plurality of oligonucleotides; (b) fractionating the first microvesicle population contacted in step (a) and recovering members of the plurality of oligonucleotides that fractionated with the first microvesicle population; (c) contacting the recovering members of the plurality of oligonucleotides from step (b) with a second microvesicle population; (d) fractionating the second microvesicle population contacted in step (c) and recovering members of the plurality of oligonucleotides that did not fractionate with the second microvesicle population; (e) contacting the recovering members of the plurality of oligonucleotides from step (d) with a third microvesicle population; and (f) fractionating the third microvesicle population contacted in step (a) and recovering members of the plurality of oligonucleotides that fractionated with the third microvesicle population; thereby enriching the plurality of oligonucleotides. The first and third microvesicle populations may have a first phenotype while the second microvesicle population has a second phenotype. Thus, positive selection occurs for the microvesicle populations associated with the first phenotype and negative selection occurs for the microvesicle populations associated with the second phenotype. An example of such selection schemes is described in Example 27 herein, wherein the first phenotype comprises biopsy-positive breast cancer and the second phenotype comprises non-breast cancer (biopsy-negative or healthy).

[0037] In some embodiments, the first phenotype comprises a medical condition, disease or disorder and the second phenotype comprises a healthy state or a different state of the medical condition, disease or disorder. The first phenotype can be a healthy state and the second phenotype comprises a medical condition, disease or disorder. The medical condition, disease or disorder can be any detectable medical condition, disease or disorder, including without limitation a cancer, a premalignant condition, an inflammatory disease, an immune disease, an autoimmune disease or disorder, a cardiovascular disease or disorder, neurological disease or disorder, infectious disease or pain. Various types of such conditions are disclosed herein. See, e.g., Section “Phenotypes” herein.

[0038] Any useful method to isolate microvesicles in whole or in part can be used to fractionate the samples. See, e.g., Section “Microvesicle Isolation and Analysis” herein. In an embodiment, the fractionating comprises ultracentrifugation in step (b) and polymer precipitation in steps (d) and (f). The polymer can be polyethylene glycol (PEG). Any appropriate form of PEG may be used. For example, the PEG may be PEG 8000. The PEG may be used at any appropriate concentration. For example, the PEG can be used at a concentration of 1%, 2%, 3%, 4%, 5%, 6%, 7%, 8%, 9%, 10%, 11%, 12%, 13%, 14% or 15% to isolate the microvesicles. In some embodiments, the PEG is used at a concentration of 6%.

[0039] The contacting can be performed in the presence of a competitor, which may reduce non-specific binding events. Any useful competitor can be used. In an embodiment, the competitor comprises at least one of salmon sperm DNA, tRNA, dextran sulfate and carboxymethyl dextran. As desired, different competitors or competitor concentrations can be used at different contacting steps.

[0040] The method can be repeated to achieve a desired enrichment. In an embodiment, steps (a)-(f) are repeated at least once. These steps can be repeated 1, 2, 3, 4, 5, 6, 7, 8, 9, 10, 11, 12, 13, 14, 15, 16, 17, 18, 19, 20, or more than 20 times as desired. At the same time, each of the contacting steps can be repeated as desired. In some embodiments, the method further comprises: (i) repeating steps (a)-(b) at least once prior to step (c), wherein the recovered members of the plurality of oligonucleotides that fractionated with the first microvesicle population in step (b) are used as the input plurality of oligonucleotides for the repetition of step (a); (ii) repeating steps (c)-(d) at least once prior to step (e), wherein the recovered members of the plurality of oligonucleotides that did not fractionate with the second microvesicle population in step (d) are used as the input plurality of oligonucleotides for the repetition of step (c); and/or (iii) repeating steps (e)-(f) at least once, wherein the recovered members of the plurality of oligonucleotides that fractionated with the third microvesicle population in step (f) are used as the input plurality of oligonucleotides for the repetition of step (e). Repetitions (i)-(iii) can be repeated any desired number of times, e.g., (i)-(iii) can be repeated 1, 2, 3, 4, 5, 6, 7, 8, 9, 10, 11, 12, 13, 14, 15, 16, 17, 18, 19, 20 or more than 20 times. In an embodiment, (i)-(iii) each comprise three repetitions.

[0041] As further described herein, the invention provides a kit comprising a reagent for carrying out the enrichment method. Similarly, the invention provides for the use of a reagent for carrying out the method. The reagent can be any useful reagent for carrying out the method. For example, the reagent can be one or more of an unenriched plurality of oligonucleotides, a partially enriched plurality of oligonucleotides, components to fractionate microvesicles, competitors, and instructions to perform the method. For example, the partially enriched plurality of oligonucleotides can be enriched against microvesicles in general and can be used to further enrich for a phenotype of interest.

[0042] In an aspect, the invention provides a method of detecting at least one microvesicle in a biological sample comprising contacting the biological sample with at least one binding agent to at least one microvesicle surface antigen and detecting the at least one microvesicle recognized by the binding agent to the at least one protein. In an embodiment, the at least one microvesicle surface antigen is selected from Tables 3-4 herein. The at least one microvesicle surface antigen can be a protein in any of Tables 22-34. See Examples 26-30. The at least one binding agent may comprise any useful binding agent, including without limitation a nucleic acid, DNA molecule, RNA molecule, antibody, antibody fragment, aptamer, peptoid, zDNA, peptide nucleic acid (PNA), locked nucleic acid (LNA), lectin, peptide, dendrimer, membrane protein labeling agent, chemical compound, or a combination thereof. In some embodiments, the at least one binding agent comprises at least one oligonucleotide, such as an oligonucleotide probe as provided herein.

[0043] The at least one binding agent can be used to capture and/or detect the at least one microvesicle. Methods of detecting biomarkers and microvesicle using binding agents are provided herein. See, e.g., FIGS. 2A-B, which figures describe sandwich assay formats. In some embodiments, the at least one binding agent used to capture the at least one microvesicle is bound to a substrate. Any useful substrate can be used, including without limitation a planar array, a column matrix, or a microbead. See, e.g., FIGS. 2A-B. In some embodiments, the at least one binding agent used to detect the at least one microvesicle is labeled. Various useful labels are provided herein or known in the art, including without limitation a magnetic label, a fluorescent moiety, an enzyme, a chemiluminescent probe, a metal particle, a non-metal colloidal particle, a polymeric dye particle, a pigment molecule, a pigment particle, an electrochemically active species, a semiconductor nanocrystal, a nanoparticle, a quantum dot, a gold particle, a fluorophore, or a radioactive label.

[0044] In an embodiment, the detecting is used to characterize a phenotype. The phenotype can be any appropriate phenotype of interest. In some embodiments, the phenotype is a disease or disorder. The characterizing may comprise providing diagnostic, prognostic and/or theranostic information for the disease or disorder. The characterizing may be performed by comparing a presence or level of the at least one microvesicle to a reference. The reference can be selected per the characterizing to be performed. For example, when the phenotype comprises a disease or disorder, the reference may comprise a presence or level of the at least one microvesicle in a sample from an individual or group of individuals without the disease or disorder. The comparing can be determining whether the presence or level of the microvesicle differs from that of the reference. In some embodiments, the detected at least one microvesicle is found at higher levels in a healthy sample as compared to a diseased sample. In another embodiment, the detected at least one microvesicle is found at higher levels in a diseased sample as compared to a healthy sample. When multiplex assays are performed, e.g., using a plurality of binding agents to different biomarkers, some microvesicle antigens may be observed at a higher level in the biological samples as compared to the reference whereas other microvesicle antigens may be observed at a lower level in the biological samples as compared to the reference.

[0045] The method can be used to detect the at least one microvesicle in any appropriate biological sample. For example, the biological sample may comprise a bodily fluid, tissue sample or cell culture. The bodily fluid or tissue sample can be from a subject having or suspected of having a medical condition, a disease or a disorder. Thus, the method can be used to provide a diagnostic, prognostic, or theranostic read out for the subject. Any appropriate bodily fluid can be used, including without limitation peripheral blood, sera, plasma, ascites, urine, cerebrospinal fluid (CSF), sputum, saliva, bone marrow, synovial fluid, aqueous humor, amniotic fluid, cerumen, breast milk, broncheoalveolar lavage fluid, semen, prostatic fluid, cowper's fluid or pre-ejaculatory fluid, female ejaculate, sweat, fecal matter, hair oil, tears, cyst fluid, pleural and peritoneal fluid, pericardial fluid, lymph, chyme, chyle, bile, interstitial fluid, menses, pus, sebum, vomit, vaginal secretions, mucosal secretion, stool water, pancreatic juice, lavage fluids from sinus cavities, bronchopulmonary aspirates, blastocyl cavity fluid, or umbilical cord blood.

[0046] The method of the invention can be used to detect or characterize any appropriate disease or disorder of interest, including without limitation Breast Cancer, Alzheimer's disease, bronchial asthma, Transitional cell carcinoma of the bladder, Giant cellular osteoblastoclastoma, Brain Tumor, Colorectal adenocarcinoma, Chronic obstructive pulmonary disease (COPD), Squamous cell carcinoma of the cervix, acute myocardial infarction (AMI)/acute heart failure, Chron's Disease, diabetes mellitus type II, Esophageal carcinoma, Squamous cell carcinoma of the larynx, Acute and chronic leukemia of the bone marrow, Lung carcinoma, Malignant lymphoma, Multiple Sclerosis, Ovarian carcinoma, Parkinson disease, Prostate adenocarcinoma, psoriasis, Rheumatoid Arthritis, Renal cell carcinoma, Squamous cell carcinoma of skin, Adenocarcinoma of the stomach, carcinoma of the thyroid gland, Testicular cancer, ulcerative colitis, or Uterine adenocarcinoma.

[0047] In some embodiments, the disease or disorder comprises a cancer, a premalignant condition, an inflammatory disease, an immune disease, an autoimmune disease or disorder, a cardiovascular disease or disorder, neurological disease or disorder, infectious disease or pain. The cancer can include without limitation one of acute lymphoblastic leukemia; acute myeloid leukemia; adrenocortical carcinoma; AIDS-related cancers; AIDS-related lymphoma; anal cancer; appendix cancer; astrocytomas; atypical teratoid/rhabdoid tumor; basal cell carcinoma; bladder cancer; brain stem glioma; brain tumor (including brain stem glioma, central nervous system atypical teratoid/rhabdoid tumor, central nervous system embryonal tumors, astrocytomas, craniopharyngioma, ependymoblastoma, ependymoma, medulloblastoma, medulloepithelioma, pineal parenchymal tumors of intermediate differentiation, supratentorial primitive neuroectodermal tumors and pineoblastoma); breast cancer; bronchial tumors; Burkitt lymphoma; cancer of unknown primary site; carcinoid tumor; carcinoma of unknown primary site; central nervous system atypical teratoid/rhabdoid tumor; central nervous system embryonal tumors; cervical cancer; childhood cancers; chordoma; chronic lymphocytic leukemia; chronic myelogenous leukemia; chronic myeloproliferative disorders; colon cancer; colorectal cancer; craniopharyngioma; cutaneous T-cell lymphoma; endocrine pancreas islet cell tumors; endometrial cancer; ependymoblastoma; ependymoma; esophageal cancer; esthesioneuroblastoma; Ewing sarcoma; extracranial germ cell tumor; extragonadal germ cell tumor; extrahepatic bile duct cancer; gallbladder cancer; gastric (stomach) cancer; gastrointestinal carcinoid tumor; gastrointestinal stromal cell tumor; gastrointestinal stromal tumor (GIST); gestational trophoblastic tumor; glioma; hairy cell leukemia; head and neck cancer; heart cancer; Hodgkin lymphoma; hypopharyngeal cancer; intraocular melanoma; islet cell tumors; Kaposi sarcoma; kidney cancer; Langerhans cell histiocytosis; laryngeal cancer; lip cancer; liver cancer; lung cancer; malignant fibrous histiocytoma bone cancer; medulloblastoma; medulloepithelioma; melanoma; Merkel cell carcinoma; Merkel cell skin carcinoma; mesothelioma; metastatic squamous neck cancer with occult primary; mouth cancer; multiple endocrine neoplasia syndromes; multiple myeloma; multiple myeloma/plasma cell neoplasm; mycosis fungoides; myelodysplastic syndromes; myeloproliferative neoplasms; nasal cavity cancer; nasopharyngeal cancer; neuroblastoma; Non-Hodgkin lymphoma; nonmelanoma skin cancer; non-small cell lung cancer; oral cancer; oral cavity cancer; oropharyngeal cancer; osteosarcoma; other brain and spinal cord tumors; ovarian cancer; ovarian epithelial cancer; ovarian germ cell tumor; ovarian low malignant potential tumor; pancreatic cancer; papillomatosis; paranasal sinus cancer; parathyroid cancer; pelvic cancer; penile cancer; pharyngeal cancer; pineal parenchymal tumors of intermediate differentiation; pineoblastoma; pituitary tumor; plasma cell neoplasm/multiple myeloma; pleuropulmonary blastoma; primary central nervous system (CNS) lymphoma; primary hepatocellular liver cancer; prostate cancer; rectal cancer; renal cancer; renal cell (kidney) cancer; renal cell cancer; respiratory tract cancer; retinoblastoma; rhabdomyosarcoma; salivary gland cancer; Sézary syndrome; small cell lung cancer; small intestine cancer; soft tissue sarcoma; squamous cell carcinoma; squamous neck cancer; stomach (gastric) cancer; supratentorial primitive neuroectodermal tumors; T-cell lymphoma; testicular cancer; throat cancer; thymic carcinoma; thymoma; thyroid cancer; transitional cell cancer; transitional cell cancer of the renal pelvis and ureter; trophoblastic tumor; ureter cancer; urethral cancer; uterine cancer; uterine sarcoma; vaginal cancer; vulvar cancer; Waldenström macroglobulinemia; or Wilm's tumor. The premalignant condition can include without limitation Barrett's Esophagus. The autoimmune disease can include without limitation one of inflammatory bowel disease (IBD), Crohn's disease (CD), ulcerative colitis (UC), pelvic inflammation, vasculitis, psoriasis, diabetes, autoimmune hepatitis, multiple sclerosis, myasthenia gravis, Type I diabetes, rheumatoid arthritis, psoriasis, systemic lupus erythematosis (SLE), Hashimoto's Thyroiditis, Grave's disease, Ankylosing Spondylitis Sjogrens Disease, CREST syndrome, Scleroderma, Rheumatic Disease, organ rejection, Primary Sclerosing Cholangitis, or sepsis. The cardiovascular disease can include without limitation one of atherosclerosis, congestive heart failure, vulnerable plaque, stroke, ischemia, high blood pressure, stenosis, vessel occlusion or a thrombotic event. The neurological disease can include without limitation one of Multiple Sclerosis (MS), Parkinson's Disease (PD), Alzheimer's Disease (AD), schizophrenia, bipolar disorder, depression, autism, Prion Disease, Pick's disease, dementia, Huntington disease (HD), Down's syndrome, cerebrovascular disease, Rasmussen's encephalitis, viral meningitis, neurospsychiatric systemic lupus erythematosus (NPSLE), amyotrophic lateral sclerosis, Creutzfeldt-Jacob disease, Gerstmann-Straussler-Scheinker disease, transmissible spongiform encephalopathy, ischemic reperfusion damage (e.g. stroke), brain trauma, microbial infection, or chronic fatigue syndrome. The pain can include without limitation one of fibromyalgia, chronic neuropathic pain, or peripheral neuropathic pain. The infectious disease can include without limitation one of a bacterial infection, viral infection, yeast infection, Whipple's Disease, Prion Disease, cirrhosis, methicillin-resistant staphylococcus aureus, HIV, HCV, hepatitis, syphilis, meningitis, malaria, tuberculosis, or influenza. One of skill will appreciate that oligonucleotide probes or plurality of oligonucleotides or methods of the invention can be used to assess any number of these or other related diseases and disorders.

[0048] In a related aspect, the invention provides a kit comprising a reagent for carrying out the methods herein. In still another related aspect, the invention provides for use of a reagent for carrying out the methods. The reagent may comprise at least one binding agent to the at least one protein. The binding agent may be an oligonucleotide probe as provided herein.

### BRIEF DESCRIPTION OF THE DRAWINGS

[0049] FIG. 1 illustrates a competitive assay selection strategy: the random pool of aptamer (the library) is incubated with the target protein, in this case, EpCAM. After washing and elution from the target, the eluted aptamers are again added to the target and allowed to bind. The antibody is then added to the reaction, competing with the aptamers at the epitope of the antibody. The aptamers displaced by the antibody are then collected.

[0050] FIGS. 2A-2F illustrate methods of assessing biomarkers such as microvesicle surface antigens. FIG. 2A is a schematic of a planar substrate coated with a capture agent, such as an aptamer or antibody, which captures vesicles expressing the target antigen of the capture agent. The capture agent may bind a protein expressed on the surface of vesicles shed from diseased cells (“disease vesicle”). The detection agent, which may also be an aptamer or antibody, carries a detectable label, here a fluorescent signal. The detection agent binds to the captured vesicle and provides a detectable signal via its fluorescent label. The detection agent can detect an antigen that is generally associated with vesicles, or is associated with a cell-of-origin or a disease, e.g., a cancer. FIG. 2B is a schematic of a particle bead conjugated with a capture agent, which captures vesicles expressing the target antigen of the capture agent. The capture agent may bind a protein expressed on the surface of vesicles shed from diseased cells (“disease vesicle”). The detection agent, which may also be an aptamer or antibody, carries a detectable label, here a fluorescent signal. The detection agent binds to the captured vesicle and provides a detectable signal via its fluorescent label. The detection agent can detect an antigen that is generally associated with vesicles, or is associated with a cell-of-origin or a disease, e.g., a cancer. FIG. 2C is an example of a screening scheme that can be performed by using different combinations of capture and detection agents to the indicated biomarkers. The biomarker combinations can be detected using assays as shown in FIGS. 2A-2B. FIGS. 2D-2E present illustrative schemes for capturing and detecting vesicles to characterize a phenotype. FIG. 2F presents illustrative schemes for assessing vesicle payload to characterize a phenotype.

[0051] FIGS. 3A-B illustrates a non-limiting example of an aptamer nucleotide sequence and its secondary structure. FIG. 3A illustrates a secondary structure of a 32-mer oligonucleotide, Aptamer 4, with sequence 5′-CCCCCCGAATCACATGACTTGGGCGGGGGTCG (SEQ ID NO. 1). In the figure, the sequence is shown with 6 thymine nucleotides added to the end, which can act as a spacer to attach a biotin molecule. This particular oligo has a high binding affinity to the target, EpCAM (see Table 5). Additional candidate EpCAM binders are identified by modeling the entire database of sequenced oligos to the secondary structure of this oligo. FIG. 3B illustrates another 32-mer oligo with sequence 5′-ACCGGATAGCGGTTGGAGGCGTGCTCCACTCG (SEQ ID NO. 2) that has a different secondary structure than the aptamer in FIG. 3A. This aptamer is also shown with a 6-thymine tail.

[0052] FIG. 4 illustrates a process for producing a target-specific set of aptamers using a cell subtraction method, wherein the target is a biomarker associated with a specific disease. In Step 1, a random pool of oligonucleotides is contacted with a biological sample from a normal patient. In Step 2, the oligos that did not bind in Step 1 are added to a biological sample isolated from diseased patients. The bound oligos from this step are then eluted, captured via their biotin linkage and then combined again with normal biological sample. The unbound oligos are then added again to disease-derived biological sample and isolated. This process can be repeated iteratively. The final eluted aptamers are tested against patient samples to measure the sensitivity and specificity of the set. Biological samples can include blood, including plasma or serum, or other components of the circulatory system, such as microvesicles.

[0053] FIG. 5 illustrates results from a binding assay showing the binding affinity of an exemplary aptamer (Aptamer ID BTX176881 (SEQ ID NO: 3)) to the target EpCAM protein at various target concentrations. The aptamer to be tested is fixed to a substrate using a biotin tail and is incubated with various concentrations of target (125, 250 and 500 nM). The test is performed on a surface plasmon resonance machine (SPR). The SPR machine detects association and disassociation of the aptamer and the target. Target is applied until the association and disassociation events are equal, resulting in a plateau of the curve. The equations describing the curve at each concentration can then be used to calculate the K_{D} of the aptamer (see Table 5).

[0054] FIGS. 6A-D illustrate the use of an anti-EpCAM aptamer (Aptamer 4; SEQ ID NO. 1) to detect a microvesicle population. Vesicles in patient plasma samples were captured using bead-conjugated antibodies to the indicated microvesicle surface antigens: A) EGFR; B) PBP; C) EpCAM; D) KLK2. Fluorescently labeled Aptamer 4 was used as a detector in the microbead assay. The figure shows average median fluorescence values (MFI values) for three cancer (C1-C3) and three normal samples (N1-N3) in each plot. In each plot, the samples from left to right are ordered as: C1, C2, C3, N1, N2, N3.

[0055] FIG. 7A illustrates the sequence of EPCAM aptamer CAR003 (SEQ ID NO. 4). FIG. 7B illustrates the optimal secondary structure of CAR003 with a minimum free energy (AG) of −30.00 kcal/mol. For purposes of illustration, the aptamer is shown as an RNA aptamer (SEQ ID NO. 5) corresponding to the DNA sequence in FIG. 7A. FIG. 7C illustrates aptamer pool purification. The figure comprises an FPLC chromatogram with all product and fractions assigned in pools after checking quality on a gel. FIG. 7D illustrates a SYBR GOLD stained gel with different FPLC fractions of CAR003 aptamer after synthesis. Different fractions were combined in pools based on amount of un-finished chains in order high to low (pool 1-pool 3). The pools 1-3 correspond to those indicated in FIG. 7C. FIG. 7E-F illustrate binding of CAR003 to EPCAM protein in 25 mM HEPES with PBS-BN (FIG. 7E) or in 25 mM HEPES with 1 mM MgCl₂ (FIG. 7F). FIG. 7G illustrates CAR003 binding to EpCAM in the indicated salts with and without addition of bovine serum albumin (BSA). FIG. 7H illustrates the effect of denaturing on CAR003 binding to EPCAM protein. In each group of four bars, the aptamer is from left to right: Aptamer 4, CAR003 Pool 1, CAR003 Pool 2, and CAR003 Pool 3. FIG. 7I illustrates titration of aptamers against EPCAM recombinant protein (constant input 5 μg). FIG. 7J illustrates a Western blot with CAR003 aptamer versus EPCAM his-tagged protein, BSA, and HSA (5 μg each). The gel was blocked 0.5% F127 and probed with ˜50 μg/ml CAR003 biotinylated aptamer, fraction 3. The blot was visualized with NeutrAvidin-HRP followed by SuperSignal West Femto Chemiluminescent Substrate.

[0056] FIGS. 8A-8D illustrates methods to attach microvesicles to a substrate. FIG. 8A illustrates direct conjugation of a carboxylated microsphere to a vesicle surface antigen. FIG. 8B illustrates anchoring of a microvesicle to a microsphere via a biotin functionalized lipid anchor. FIG. 8C illustrates antibody binding to a vesicle surface antigen, wherein the antibody is conjugated to a carboxylated microsphere. FIG. 8D illustrates aptamer binding to a vesicle surface antigen, wherein the aptamer is conjugated to a carboxylated microsphere.

[0057] FIG. 9 comprises a schematic for identifying a target of a selected aptamer, such as an aptamer selected by the above process. The figure shows a binding agent 902, here an aptamer for purposes of illustration, tethered to a substrate 901. The binding agent 902 can be covalently attached to substrate 901. The binding agent 902 may also be non-covalently attached. For example, binding agent 902 can comprise a label which can be attracted to the substrate, such as a biotin group which can form a complex with an avidin/streptavidin molecule that is covalently attached to the substrate. The binding agent 902 binds to a surface antigen 903 of microvesicle 904. In the step signified by arrow (i), the microvesicle is disrupted while leaving the complex between the binding agent 902 and surface antigen 903 intact. Disrupted microvesicle 905 is removed, e.g., via washing or buffer exchange, in the step signified by arrow (ii). In the step signified by arrow (iii), the surface antigen 903 is released from the binding agent 902. The surface antigen 903 can be analyzed to determine its identity.

[0058] FIGS. 10A-10C illustrate binding of selected aptamers against microbeads conjugated to various input sample. The aptamers were selected from an aptamer library as binding to microbeads conjugated to breast cancer-derived microvesicles. Experimental details are in the Examples herein. Each plot shows a different aptamer. The Y-axis indicates level of binding. In each group of samples, binding of 9 purified aptamer candidates is shown. The input sample is indicated on the X axis from left to right as follows: 1) Cancer Exosome: aptamer binding to microbeads conjugated to microvesicles isolated from plasma samples from breast cancer patients; 2) Cancer Non-exosome: aptamer binding to microbeads conjugated to plasma samples from breast cancer patients after removal of microvesicles by ultracentrifugation; 3) Non-Cancer Exosome: aptamer binding to microbeads conjugated to microvesicles isolated from plasma samples from normal (i.e., non-breast cancer) patients; 4) Non-Cancer Non-Exosome: aptamer binding to microbeads conjugated to plasma samples from breast cancer patients after removal of microvesicles by ultracentrifugation.

[0059] FIGS. 11A-11B illustrate enriching a naïve aptamer library for oligonucleotides that differentiate between breast cancer and non-cancer microvesicles in plasma samples.

[0060] FIGS. 12A-12G illustrate using an oligonucleotide probe library to differentiate cancer and non-cancer samples.

[0061] FIG. 13 illustrates a method of detecting Ago2-miR-catalyzed cleavage events.

[0062] FIGS. 14A-14E illustrate a method of detecting Ago2-miR-catalyzed cariMir cleavage.

[0063] FIGS. 15A-15D illustrate a method of detecting Ago2-miR-catalyzed miR cleavage using a molecular beacon approach.

[0064] FIGS. 16A-F illustrate anti-miR molecular beacons and miRs corresponding to Let-7a, miR-16, miR-21 and miR-92a.

[0065] FIGS. 17A-B illustrate design of cariMir libraries.

[0066] FIGS. 18A-E show the identification of Adaptive Dynamic Artificial Poly-ligand Targeting (ADAPT™) targets. FIG. 18A shows protein bands recognized by ADAPT oligonucleotides on a silver stained SDS-PAGE gel. FIG. 18B shows a Venn diagram of proteins identified by pull-down with the enriched L2 Library vs the unenriched L0 Library. FIGS. 18C-E illustrates GO enrichment showing proteins identified in pull-down with L2 Library are enriched for EV compartment and nucleic acid binding molecular function. The proteins are grouped by GO Cellular Compartment (FIG. 18C), GO Biological Process (FIG. 18D) and GO Molecular Function (FIG. 18E).

[0067] FIGS. 19A-C illustrate use of aptamers in methods of characterizing a phenotype. FIG. 19A is a schematic 1900 showing an assay configuration that can be used to detect and/or quantify a target of interest. In the figure, capture aptamer 1902 is attached to substrate 1901. Target of interest 1903 is bound by capture aptamer 1902. Detection aptamer 1904 is also bound to target of interest 1903. Detection aptamer 1904 carries label 1905 which can be detected to identify target captured to substrate 1901 via capture aptamer 1902. FIG. 19B is a schematic 1910 showing use of an aptamer pool to characterize a phenotype. A pool of aptamers to a target of interest is provided 1911. The pool is contacted with a test sample to be characterized 1912. The mixture is washed to remove unbound aptamers. The remaining aptamers are disassociated and collected 1913. The collected aptamers are identified 1914 and the identity of the retained aptamers is used to characterize the phenotype 1915. FIG. 19C is a schematic 1920 showing an implementation of the method in FIG. 19B. A pool of aptamers identified as binding a microvesicle population is provided 1921. The input sample comprises microvesicles that are isolated from a test sample 1922. The pool is contacted with the isolated microvesicles to be characterized 1923. The mixture is washed to remove unbound aptamers and the remaining aptamers are disassociated and collected 1925. The collected aptamers are identified and the identity of the retained aptamers is used to characterize the phenotype 1926.

[0068] FIGS. 20A-20I illustrate development and use of an oligonucleotide probe library to distinguish biological sample types.

[0069] FIGS. 21A-C illustrate enriching a naïve oligonucleotide library with balanced design for oligonucleotides that differentiate between breast cancer and non-cancer microvesicles derived from plasma samples.

### DETAILED DESCRIPTION OF THE INVENTION

[0070] The details of one or more embodiments of the invention are set forth in the accompanying description below. Although any methods and materials similar or equivalent to those described herein can be used in the practice or testing of the present invention, the preferred methods and materials are now described. Other features, objects, and advantages of the invention will be apparent from the description. In the specification, the singular forms also include the plural unless the context clearly dictates otherwise. Unless defined otherwise, all technical and scientific terms used herein have the same meaning as commonly understood by one of ordinary skill in the art to which this invention belongs. In the case of conflict, the present Specification will control.

[0071] Disclosed herein are compositions and methods that can be used to assess a biomarker profile, which can include a presence or level of one or more biomarkers. The compositions and methods of the invention comprise the use of oligonucleotide probes (aptamers) that bind microvesicle surface antigens or a functional fragment thereof. The antigens typically comprise proteins or polypeptides but can be any useful component displayed on a microvesicle surface including nucleic acids, lipids and/or carbohydrates. In general, the oligonucleotides disclosed are synthetic nucleic acid molecules, including DNA and RNA, and variations thereof. Unless otherwise specified, the oligonucleotide probes can be synthesized in DNA or RNA format or as hybrid molecules as desired. The methods disclosed comprise diagnostic processes and techniques using one or more aptamer of the invention, to determine the level or presence of relevant microvesicle surface antigens or a functional fragment thereof. Alternatively, an oligonucleotide probe of the invention can also be used as a binding agent to capture, isolate, or enrich, a cell, cell fragment, vesicle or any other fragment or complex that comprises the antigen or functional fragments thereof.

[0072] The compositions and methods of the invention comprise individual oligonucleotides that are identified for use in assessing a biomarker profile. The invention further discloses compositions and methods of oligonucleotide pools that can be used to detect a biomarker profile in a given sample.

[0073] Oligonucleotide probes and sequences disclosed in the compositions and methods of the invention may be identified herein in the form of DNA or RNA. Unless otherwise specified, one of skill in the art will appreciate that an oligonucleotide may generally be synthesized as either form of nucleic acid and carry various chemical modifications and remain within the scope of the invention. The term aptamer may be used in the art to refer to a single oligonucleotide that binds specifically to a target of interest through mechanisms other than Watson crick base pairing, similar to binding of a monoclonal antibody to a particular antigen. Within the scope of this disclosure and unless stated explicitly or otherwise implicit in context, the terms aptamer, oligonucleotide and oligonucleotide probe, and variations thereof, may be used interchangeably to refer to an oligonucleotide capable of distinguishing biological entities of interest (e.g, biomarkers) whether or not the specific entity has been identified or whether the precise mode of binding has been determined.

[0074] An oligonucleotide probe of the invention can also be used to provide in vitro or in vivo detection or imaging, to provide any appropriate diagnostic readout (e.g., diagnostic, prognostic or theranostic).

[0075] Separately, an oligonucleotide probe of the invention can also be used for treatment or as a therapeutic to specifically target a cell, tissue or organ.

### Aptamers

[0076] SELEX. A suitable method for generating an aptamer is with the process entitled “Systematic Evolution of Ligands by Exponential Enrichment” (“SELEX”) generally described in, e.g., U.S. patent application Ser. No. 07/536,428, filed Jun. 11, 1990, now abandoned, U.S. Pat. No. 5,475,096 entitled “Nucleic Acid Ligands”, and U.S. Pat. No. 5,270,163 (see also WO 91/19813) entitled “Nucleic Acid Ligands”. Each SELEX-identified nucleic acid ligand, i.e., each aptamer, is a specific ligand of a given target compound or molecule. The SELEX process is based on the unique insight that nucleic acids have sufficient capacity for forming a variety of two- and three-dimensional structures and sufficient chemical versatility available within their monomers to act as ligands (i.e., form specific binding pairs) with virtually any chemical compound, whether monomeric or polymeric. Molecules of any size or composition can serve as targets.

[0077] SELEX relies as a starting point upon a large library or pool of single stranded oligonucleotides comprising randomized sequences. The oligonucleotides can be modified or unmodified DNA, RNA, or DNA/RNA hybrids. In some examples, the pool comprises 100% random or partially random oligonucleotides. In other examples, the pool comprises random or partially random oligonucleotides containing at least one fixed and/or conserved sequence incorporated within randomized sequence. In other examples, the pool comprises random or partially random oligonucleotides containing at least one fixed and/or conserved sequence at its 5′ and/or 3′ end which may comprise a sequence shared by all the molecules of the oligonucleotide pool. Fixed sequences are sequences such as hybridization sites for PCR primers, promoter sequences for RNA polymerases (e.g., T3, T4, T7, and SP6), restriction sites, or homopolymeric sequences, such as poly A or poly T tracts, catalytic cores, sites for selective binding to affinity columns, and other sequences to facilitate cloning and/or sequencing of an oligonucleotide of interest. Conserved sequences are sequences, other than the previously described fixed sequences, shared by a number of aptamers that bind to the same target.

[0078] The oligonucleotides of the pool preferably include a randomized sequence portion as well as fixed sequences necessary for efficient amplification. Typically the oligonucleotides of the starting pool contain fixed 5′ and 3′ terminal sequences which flank an internal region of 30-50 random nucleotides. The randomized nucleotides can be produced in a number of ways including chemical synthesis and size selection from randomly cleaved cellular nucleic acids. Sequence variation in test nucleic acids can also be introduced or increased by mutagenesis before or during the selection/amplification iterations.

[0079] The random sequence portion of the oligonucleotide can be of any length and can comprise ribonucleotides and/or deoxyribonucleotides and can include modified or non-natural nucleotides or nucleotide analogs. See, e.g. U.S. Pat. No. 5,958,691; U.S. Pat. No. 5,660,985; U.S. Pat. No. 5,958,691; U.S. Pat. No. 5,698,687; U.S. Pat. No. 5,817,635; U.S. Pat. No. 5,672,695, and PCT Publication WO 92/07065. Random oligonucleotides can be synthesized from phosphodiester-linked nucleotides using solid phase oligonucleotide synthesis techniques well known in the art. See, e.g., Froehler et al., Nucl. Acid Res. 14:5399-5467 (1986) and Froehler et al., Tet. Lett. 27:5575-5578 (1986). Random oligonucleotides can also be synthesized using solution phase methods such as triester synthesis methods. See, e.g., Sood et al., Nucl. Acid Res. 4:2557 (1977) and Hirose et al., Tet. Lett., 28:2449 (1978). Typical syntheses carried out on automated DNA synthesis equipment yield 10¹⁴-10¹⁶ individual molecules, a number sufficient for most SELEX experiments. Sufficiently large regions of random sequence in the sequence design increases the likelihood that each synthesized molecule is likely to represent a unique sequence.

[0080] The starting library of oligonucleotides may be generated by automated chemical synthesis on a DNA synthesizer. To synthesize randomized sequences, mixtures of all four nucleotides are added at each nucleotide addition step during the synthesis process, allowing for random incorporation of nucleotides. As stated above, in one embodiment, random oligonucleotides comprise entirely random sequences; however, in other embodiments, random oligonucleotides can comprise stretches of nonrandom or partially random sequences. Partially random sequences can be created by adding the four nucleotides in different molar ratios at each addition step.

[0081] The starting library of oligonucleotides may be for example, RNA, DNA, or RNA/DNA hybrid. In those instances where an RNA library is to be used as the starting library it is typically generated by transcribing a DNA library in vitro using T7 RNA polymerase or modified T7 RNA polymerases and purified. The library is then mixed with the target under conditions favorable for binding and subjected to step-wise iterations of binding, partitioning and amplification, using the same general selection scheme, to achieve virtually any desired criterion of binding affinity and selectivity. More specifically, starting with a mixture containing the starting pool of nucleic acids, the SELEX method includes steps of: (a) contacting the mixture with the target under conditions favorable for binding; (b) partitioning unbound nucleic acids from those nucleic acids which have bound specifically to target molecules; (c) dissociating the nucleic acid-target complexes; (d) amplifying the nucleic acids dissociated from the nucleic acid-target complexes to yield a ligand-enriched mixture of nucleic acids; and (e) reiterating the steps of binding, partitioning, dissociating and amplifying through as many cycles as desired to yield highly specific, high affinity nucleic acid ligands to the target molecule. In those instances where RNA aptamers are being selected, the SELEX method further comprises the steps of: (i) reverse transcribing the nucleic acids dissociated from the nucleic acid-target complexes before amplification in step (d); and (ii) transcribing the amplified nucleic acids from step (d) before restarting the process.

[0082] Within a nucleic acid mixture containing a large number of possible sequences and structures, there is a wide range of binding affinities for a given target. A nucleic acid mixture comprising, for example, a 20 nucleotide randomized segment can have 4²⁰ candidate possibilities. Those which have the higher affinity constants for the target are most likely to bind to the target. After partitioning, dissociation and amplification, a second nucleic acid mixture is generated, enriched for the higher binding affinity candidates. Additional rounds of selection progressively favor better ligands until the resulting nucleic acid mixture is predominantly composed of only one or a few sequences. These can then be cloned, sequenced and individually tested for binding affinity as pure ligands or aptamers.

[0083] Cycles of selection and amplification are repeated until a desired goal is achieved. In the most general case, selection/amplification is continued until no significant improvement in binding strength is achieved on repetition of the cycle. The method is typically used to sample approximately 10¹⁴ different nucleic acid species but may be used to sample as many as about 10¹⁸ different nucleic acid species. Generally, nucleic acid aptamer molecules are selected in a 5 to 20 cycle procedure. In one embodiment, heterogeneity is introduced only in the initial selection stages and does not occur throughout the replicating process.

[0084] In one embodiment of SELEX, the selection process is so efficient at isolating those nucleic acid ligands that bind most strongly to the selected target, that only one cycle of selection and amplification is required. Such an efficient selection may occur, for example, in a chromatographic-type process wherein the ability of nucleic acids to associate with targets bound on a column operates in such a manner that the column is sufficiently able to allow separation and isolation of the highest affinity nucleic acid ligands.

[0085] In many cases, it is not necessarily desirable to perform the iterative steps of SELEX until a single nucleic acid ligand is identified. The target-specific nucleic acid ligand solution may include a family of nucleic acid structures or motifs that have a number of conserved sequences and a number of sequences which can be substituted or added without significantly affecting the affinity of the nucleic acid ligands to the target. By terminating the SELEX process prior to completion, it is possible to determine the sequence of a number of members of the nucleic acid ligand solution family. The invention provides for the identification of aptamer pools and uses thereof that jointly can be used to characterize a test sample. For example, the aptamer pools can be identified through rounds of positive and negative selection to identify microvesicle indicative of a disease or condition. The invention further provides use of such aptamer pools to detect and/or quantify such microvesicles in a sample, thereby allowing a diagnosis, prognosis or theranosis to be provided.

[0086] A variety of nucleic acid primary, secondary and tertiary structures are known to exist. The structures or motifs that have been shown most commonly to be involved in non-Watson-Crick type interactions are referred to as hairpin loops, symmetric and asymmetric bulges, pseudoknots and myriad combinations of the same. Almost all known cases of such motifs suggest that they can be formed in a nucleic acid sequence of no more than 30 nucleotides. For this reason, it is often preferred that SELEX procedures with contiguous randomized segments be initiated with nucleic acid sequences containing a randomized segment of between about 20 to about 50 nucleotides and in some embodiments, about 30 to about 40 nucleotides. In one example, the 5′-fixed:random:3′-fixed sequence comprises a random sequence of about 30 to about 50 nucleotides.

[0087] The core SELEX method has been modified to achieve a number of specific objectives. For example, U.S. Pat. No. 5,707,796 describes the use of SELEX in conjunction with gel electrophoresis to select nucleic acid molecules with specific structural characteristics, such as bent DNA. U.S. Pat. No. 5,763,177 describes SELEX based methods for selecting nucleic acid ligands containing photoreactive groups capable of binding and/or photocrosslinking to and/or photoinactivating a target molecule. U.S. Pat. No. 5,567,588 and U.S. Pat. No. 5,861,254 describe SELEX based methods which achieve highly efficient partitioning between oligonucleotides having high and low affinity for a target molecule. U.S. Pat. No. 5,496,938 describes methods for obtaining improved nucleic acid ligands after the SELEX process has been performed. U.S. Pat. No. 5,705,337 describes methods for covalently linking a ligand to its target.

[0088] SELEX can also be used to obtain nucleic acid ligands that bind to more than one site on the target molecule, and to obtain nucleic acid ligands that include non-nucleic acid species that bind to specific sites on the target. SELEX provides means for isolating and identifying nucleic acid ligands which bind to any envisionable target, including large and small biomolecules such as nucleic acid-binding proteins and proteins not known to bind nucleic acids as part of their biological function as well as lipids, cofactors and other small molecules. For example, U.S. Pat. No. 5,580,737 discloses nucleic acid sequences identified through SELEX which are capable of binding with high affinity to caffeine and the closely related analog, theophylline.

[0089] Counter-SELEX is a method for improving the specificity of nucleic acid ligands to a target molecule by eliminating nucleic acid ligand sequences with cross-reactivity to one or more non-target molecules. Counter-SELEX is comprised of the steps of: (a) preparing a candidate mixture of nucleic acids; (b) contacting the candidate mixture with the target, wherein nucleic acids having an increased affinity to the target relative to the candidate mixture may be partitioned from the remainder of the candidate mixture; (c) partitioning the increased affinity nucleic acids from the remainder of the candidate mixture; (d) dissociating the increased affinity nucleic acids from the target; e) contacting the increased affinity nucleic acids with one or more non-target molecules such that nucleic acid ligands with specific affinity for the non-target molecule(s) are removed; and (f) amplifying the nucleic acids with specific affinity only to the target molecule to yield a mixture of nucleic acids enriched for nucleic acid sequences with a relatively higher affinity and specificity for binding to the target molecule. As described above for SELEX, cycles of selection and amplification are repeated until a desired goal is achieved.

[0090] One potential problem encountered in the use of nucleic acids as therapeutics and vaccines is that oligonucleotides in their phosphodiester form may be quickly degraded in body fluids by intracellular and extracellular enzymes such as endonucleases and exonucleases before the desired effect is manifest. The SELEX method thus encompasses the identification of high-affinity nucleic acid ligands containing modified nucleotides conferring improved characteristics on the ligand, such as improved in vivo stability or improved delivery characteristics. Examples of such modifications include chemical substitutions at the ribose and/or phosphate and/or base positions. SELEX identified nucleic acid ligands containing modified nucleotides are described, e.g., in U.S. Pat. No. 5,660,985, which describes oligonucleotides containing nucleotide derivatives chemically modified at the 2′ position of ribose, 5′ position of pyrimidines, and 8′ position of purines, U.S. Pat. No. 5,756,703 which describes oligonucleotides containing various 2′-modified pyrimidines, and U.S. Pat. No. 5,580,737 which describes highly specific nucleic acid ligands containing one or more nucleotides modified with 2′-amino (2′-NH₂), 2′-fluoro (2′-F), and/or 2′-O-methyl (2′-OMe) substituents.

[0091] Modifications of the nucleic acid ligands contemplated in this invention include, but are not limited to, those which provide other chemical groups that incorporate additional charge, polarizability, hydrophobicity, hydrogen bonding, electrostatic interaction, and fluxionality to the nucleic acid ligand bases or to the nucleic acid ligand as a whole. Modifications to generate oligonucleotide populations which are resistant to nucleases can also include one or more substitute internucleotide linkages, altered sugars, altered bases, or combinations thereof. Such modifications include, but are not limited to, 2′-position sugar modifications, 5-position pyrimidine modifications, 8-position purine modifications, modifications at exocyclic amines, substitution of 4-thiouridine, substitution of 5-bromo or 5-iodo-uracil; backbone modifications, phosphorothioate or allyl phosphate modifications, methylations, and unusual base-pairing combinations such as the isobases isocytidine and isoguanosine. Modifications can also include 3′ and 5′ modifications such as capping.

[0092] In one embodiment, oligonucleotides are provided in which the P(O)O group is replaced by P(O)S (“thioate”), P(S)S (“dithioate”), P(O)NR₂ (“amidate”), P(O)R, P(O)OR′, CO or CH₂ (“formacetal”) or 3′-amine (—NH—CH₂—CH₂—), wherein each R or R′ is independently H or substituted or unsubstituted alkyl. Linkage groups can be attached to adjacent nucleotides through an —O—, —N—, or —S— linkage. Not all linkages in the oligonucleotide are required to be identical. As used herein, the term phosphorothioate encompasses one or more non-bridging oxygen atoms in a phosphodiester bond replaced by one or more sulfur atoms.

[0093] In further embodiments, the oligonucleotides comprise modified sugar groups, for example, one or more of the hydroxyl groups is replaced with halogen, aliphatic groups, or functionalized as ethers or amines. In one embodiment, the 2′-position of the furanose residue is substituted by any of an O-methyl, O-alkyl, O-allyl, S-alkyl, S-allyl, or halo group. Methods of synthesis of 2′-modified sugars are described, e.g., in Sproat, et al., Nucl. Acid Res. 19:733-738 (1991); Cotten, et al., Nucl. Acid Res. 19:2629-2635 (1991); and Hobbs, et al., Biochemistry 12:5138-5145 (1973). Other modifications are known to one of ordinary skill in the art. Such modifications may be pre-SELEX process modifications or post-SELEX process modifications (modification of previously identified unmodified ligands) or may be made by incorporation into the SELEX process.

[0094] Pre-SELEX process modifications or those made by incorporation into the SELEX process yield nucleic acid ligands with both specificity for their SELEX target and improved stability, e.g., in vivo stability. Post-SELEX process modifications made to nucleic acid ligands may result in improved stability, e.g., in vivo stability without adversely affecting the binding capacity of the nucleic acid ligand.

[0095] The SELEX method encompasses combining selected oligonucleotides with other selected oligonucleotides and non-oligonucleotide functional units as described in U.S. Pat. No. 5,637,459 and U.S. Pat. No. 5,683,867. The SELEX method further encompasses combining selected nucleic acid ligands with lipophilic or non-immunogenic high molecular weight compounds in a diagnostic or therapeutic complex, as described, e.g., in U.S. Pat. No. 6,011,020, U.S. Pat. No. 6,051,698, and PCT Publication No. WO 98/18480. These patents and applications teach the combination of a broad array of shapes and other properties, with the efficient amplification and replication properties of oligonucleotides, and with the desirable properties of other molecules.

[0096] The identification of nucleic acid ligands to small, flexible peptides via the SELEX method has also been explored. Small peptides have flexible structures and usually exist in solution in an equilibrium of multiple conformers, and thus it was initially thought that binding affinities may be limited by the conformational entropy lost upon binding a flexible peptide. However, the feasibility of identifying nucleic acid ligands to small peptides in solution was demonstrated in U.S. Pat. No. 5,648,214. In this patent, high affinity RNA nucleic acid ligands to substance P, an 11 amino acid peptide, were identified.

[0097] The aptamers with specificity and binding affinity to the target(s) of the present invention can be selected by the SELEX N process as described herein. As part of the SELEX process, the sequences selected to bind to the target are then optionally minimized to determine the minimal sequence having the desired binding affinity. The selected sequences and/or the minimized sequences are optionally optimized by performing random or directed mutagenesis of the sequence to increase binding affinity or alternatively to determine which positions in the sequence are essential for binding activity. Additionally, selections can be performed with sequences incorporating modified nucleotides to stabilize the aptamer molecules against degradation in vivo.

[0098] 2′ Modified SELEX.

[0099] For an aptamer to be suitable for use as a therapeutic, it is preferably inexpensive to synthesize, and safe and stable in vivo. Wild-type RNA and DNA aptamers are typically not stable is vivo because of their susceptibility to degradation by nucleases. Resistance to nuclease degradation can be greatly increased by the incorporation of modifying groups at the 2′-position.

[0100] Fluoro and amino groups have been successfully incorporated into oligonucleotide pools from which aptamers have been subsequently selected. However, these modifications greatly increase the cost of synthesis of the resultant aptamer, and may introduce safety concerns in some cases because of the possibility that the modified nucleotides could be recycled into host DNA by degradation of the modified oligonucleotides and subsequent use of the nucleotides as substrates for DNA synthesis.

[0101] Aptamers that contain 2′-O-methyl (“2′-OMe”) nucleotides, as provided herein, overcome one or more potential drawbacks. Oligonucleotides containing 2′-OMe nucleotides are nuclease-resistant and inexpensive to synthesize. Although 2′-OMe nucleotides are ubiquitous in biological systems, natural polymerases do not accept 2′-OMe NTPs as substrates under physiological conditions, thus there are no safety concerns over the recycling of 2′-OMe nucleotides into host DNA. The SELEX method used to generate 2′-modified aptamers is described, e.g., in U.S. Provisional Patent Application Ser. No. 60/430,761, filed Dec. 3, 2002, U.S. Provisional Patent Application Ser. No. 60/487,474, filed Jul. 15, 2003, U.S. Provisional Patent Application Ser. No. 60/517,039, filed Nov. 4, 2003, U.S. patent application Ser. No. 10/729,581, filed Dec. 3, 2003, and U.S. patent application Ser. No. 10/873,856, filed Jun. 21, 2004, entitled “Method for in vitro Selection of 2′-O-methyl substituted Nucleic Acids”, each of which is herein incorporated by reference in its entirety.

### Methods

[0102] Biomarker Detection and Diagnotics

[0103] The aptamers of the invention can be used in various methods to assess presence or level of biomarkers in a biological sample, e.g., biological entities of interest such as proteins, nucleic acids, or microvesicles. The aptamer functions as a binding agent to assess presence or level of the cognate target molecule. Therefore, in various embodiments of the invention directed to diagnostics, prognostics or theranostics, one or more aptamers of the invention are configured in a ligand-target based assay, where one or more aptamer of the invention is contacted with a selected biological sample, where the or more aptamer associates with or binds to its target molecules. Aptamers of the invention are used to identify candidate biosignatures based on the biological samples assessed and biomarkers detected. In further embodiments, aptamers may themselves provide a biosignature for a particular condition or disease. A biosignature refers to a biomarker profile of a biological sample comprising a presence, level or other characteristic that can be assessed (including without limitation a sequence, mutation, rearrangement, translocation, deletion, epigenetic modification, methylation, post-translational modification, allele, activity, complex partners, stability, half life, and the like) of one or more biomarker of interest. Biosignatures can be used to evaluate diagnostic and/or prognostic criteria such as presence of disease, disease staging, disease monitoring, disease stratification, or surveillance for detection, metastasis or recurrence or progression of disease. For example, methods of the invention using aptamers against microvesicle surface antigen are useful for correlating a biosignature comprising microvesicle antigens to a selected condition or disease. A biosignature can also be used clinically in making decisions concerning treatment modalities including therapeutic intervention. A biosignature can further be used clinically to make treatment decisions, including whether to perform surgery or what treatment standards should be used along with surgery (e.g., either pre-surgery or post-surgery). As an illustrative example, a biosignature of circulating biomarkers that indicates an aggressive form of cancer may call for a more aggressive surgical procedure and/or more aggressive therapeutic regimen to treat the patient.

[0104] A biosignature can be used in any methods disclosed herein, e.g., to assess whether a subject is afflicted with disease, is at risk for developing disease or to assess the stage or progression of the disease. For example, a biosignature can be used to assess whether a subject has prostate cancer, colon cancer, or other cancer as described herein. Furthermore, a biosignature can be used to determine a stage of a disease or condition, such as colon cancer. The biosignature/biomarker profile comprising a microvesicle can include assessment of payload within the microvesicle. For example, one or more aptamer of the invention can be used to capture a microvesicle population, thereby providing readout of microvesicle antigens, and then the payload content within the captured microvesicles can be assessed, thereby providing further biomarker readout of the payload content.

[0105] A biosignature for characterizing a phenotype may comprise any number of useful criteria. As described further below, the term “phenotype” as used herein can mean any trait or characteristic that is attributed to a biosignature/biomarker profile. A phenotype can be detected or identified in part or in whole using the compositions and/or methods of the invention. In some embodiments, at least one criterion is used for each biomarker. In some embodiments, at least 1, 2, 3, 4, 5, 6, 7, 8, 9, 10, 15, 20, 30, 40, 50, 60, 70, 80, 90 or at least 100 criteria are used. For example, for the characterizing of a cancer, a number of different criteria can be used when the subject is diagnosed with a cancer: 1) if the amount of microRNA in a sample from a subject is higher than a reference value; 2) if the amount of a microRNA within cell type specific vesicles (i.e. vesicles derived from a specific tissue or organ) is higher than a reference value; or 3) if the amount of microRNA within vesicles with one or more cancer specific biomarkers is higher than a reference value. Similar rules can apply if the amount of microRNA is less than or the same as the reference. The method can further include a quality control measure, such that the results are provided for the subject if the samples meet the quality control measure. In some embodiments, if the criteria are met but the quality control is questionable, the subject is reassessed.

[0106] Theranostics

[0107] A biosignature can be used in therapy related diagnostics to provide tests useful to diagnose a disease or choose the correct treatment regimen, such as provide a theranosis. Theranostics includes diagnostic testing that provides the ability to affect therapy or treatment of a diseased state. Theranostics testing provides a theranosis in a similar manner that diagnostics or prognostic testing provides a diagnosis or prognosis, respectively. As used herein, theranostics encompasses any desired form of therapy related testing, including predictive medicine, personalized medicine, integrated medicine, pharmacodiagnostics and Dx/Rx partnering. Therapy related tests can be used to predict and assess drug response in individual subjects, i.e., to provide personalized medicine. Predicting a drug response can be determining whether a subject is a likely responder or a likely non-responder to a candidate therapeutic agent, e.g., before the subject has been exposed or otherwise treated with the treatment. Assessing a drug response can be monitoring a response to a drug, e.g., monitoring the subject's improvement or lack thereof over a time course after initiating the treatment. Therapy related tests are useful to select a subject for treatment who is particularly likely to benefit from the treatment or to provide an early and objective indication of treatment efficacy in an individual subject. Thus, a biosignature as disclosed herein may indicate that treatment should be altered to select a more promising treatment, thereby avoiding the great expense of delaying beneficial treatment and avoiding the financial and morbidity costs of administering an ineffective drug(s).

[0108] The compositions and methods of the invention can be used to identify or detect a biosignature associated with a variety of diseases and disorders, which include, but are not limited to cardiovascular disease, cancer, infectious diseases, sepsis, neurological diseases, central nervous system related diseases, endovascular related diseases, and autoimmune related diseases. Therapy related diagnostics also aid in the prediction of drug toxicity, drug resistance or drug response. Therapy related tests may be developed in any suitable diagnostic testing format, which include, but are not limited to, e.g., immunohistochemical tests, clinical chemistry, immunoassay, cell-based technologies, nucleic acid tests or body imaging methods. Therapy related tests can further include but are not limited to, testing that aids in the determination of therapy, testing that monitors for therapeutic toxicity, or response to therapy testing. Thus, a biosignature can be used to predict or monitor a subject's response to a treatment. A biosignature can be determined at different time points for a subject after initiating, removing, or altering a particular treatment.

[0109] In some embodiments, the compositions and methods of the invention provide for a determination or prediction as to whether a subject is responding to a treatment is made based on a change in the amount of one or more components of a biosignature (i.e., the microRNA, vesicles and/or biomarkers of interest), an amount of one or more components of a particular biosignature, or the biosignature detected for the components. In another embodiment, a subject's condition is monitored by determining a biosignature at different time points. The progression, regression, or recurrence of a condition is determined. Response to therapy can also be measured over a time course. Thus, the invention provides a method of monitoring a status of a disease or other medical condition in a subject, comprising isolating or detecting a biosignature from a biological sample from the subject, detecting the overall amount of the components of a particular biosignature, or detecting the biosignature of one or more components (such as the presence, absence, or expression level of a biomarker). The biosignatures are used to monitor the status of the disease or condition.

[0110] One or more novel biosignatures of a vesicle can also be identified. For example, one or more vesicles can be isolated from a subject that responds to a drug treatment or treatment regimen and compared to a reference, such as another subject that does not respond to the drug treatment or treatment regimen. Differences between the biosignatures can be determined and used to identify other subjects as responders or non-responders to a particular drug or treatment regimen.

[0111] In some embodiments, a biosignature is used to determine whether a particular disease or condition is resistant to a drug, in which case a physician need not waste valuable time with such drug treatment. To obtain early validation of a drug choice or treatment regimen, a biosignature is determined for a sample obtained from a subject. The biosignature is used to assess whether the particular subject's disease has the biomarker associated with drug resistance. Such a determination enables doctors to devote critical time as well as the patient's financial resources to effective treatments.

[0112] Biosignatures can be used in the theranosis of a cancer, such as identifying whether a subject suffering from cancer is a likely responder or non-responder to a particular cancer treatment. The subject methods can be used to theranose cancers including those listed herein, e.g., in the “Phenotypes” section below. These include without limitation lung cancer, non-small cell lung cancer small cell lung cancer (including small cell carcinoma (oat cell cancer), mixed small cell/large cell carcinoma, and combined small cell carcinoma), colon cancer, breast cancer, prostate cancer, liver cancer, pancreatic cancer, brain cancer, kidney cancer, ovarian cancer, stomach cancer, melanoma, bone cancer, gastric cancer, breast cancer, glioma, glioblastoma, hepatocellular carcinoma, papillary renal carcinoma, head and neck squamous cell carcinoma, leukemia, lymphoma, myeloma, or other solid tumors.

[0113] A biosignature of circulating biomarkers, including markers associated with a component present in a biological sample (e.g., cell, cell-fragment, cell-derived extracellular vesicle), in a sample from a subject suffering from a cancer can be used select a candidate treatment for the subject. The biosignature can be determined according to the methods of the invention presented herein. In some embodiments, the candidate treatment comprises a standard of care for the cancer. The treatment can be a cancer treatment such as radiation, surgery, chemotherapy or a combination thereof. The cancer treatment can be a therapeutic such as anti-cancer agents and chemotherapeutic regimens. Further drug associations and rules that are used in embodiments of the invention are found in U.S. patent application Ser. No. 12/658,770, filed Feb. 12, 2010; International PCT Patent Publication WO/2010/093465, filed Feb. 11, 2010; International PCT Patent Publication WO/2011/056688, filed Oct. 27, 2010; and U.S. Provisional Patent Application 61/427,788, filed Dec. 28, 2010; all of which applications are incorporated by reference herein in their entirety. See, e.g., “Table 4: Rules Summary for Treatment Selection” of WO/2011/056688.

### Biomarker Detection

[0114] The compositions and methods of the invention can be used to assess any useful biomarkers in a biological sample for charactering a phenotype associated with the sample. Such biomarkers include all sorts of biological entities such as proteins, nucleic acids, lipids, carbohydrates, complexes of any thereof, and microvesicles. Various molecules associated with a microvesicle surface or enclosed within the microvesicle (referred to herein as “payload”) can serve as biomarkers. The microvesicles themselves can also be used as biomarkers.

[0115] The aptamers of the invention can be used to assess levels or presence of a microvesicle population. See, e.g., FIGS. 19B-19C. The aptamers of the invention can also be used to assess levels or presence of their specific target molecule. See, e.g., FIG. 19A. In addition, aptamers of the invention are used to capture or isolated a component present in a biological sample that has the aptamer's target molecule present. For example, if a given microvesicle surface antigen is present on a cell, cell fragment or cell-derived extracellular vesicle. A binding agent to the biomarker, including without limitation an aptamer provided by the invention, may be used to capture or isolate the cell, cell fragment or cell-derived extracellular vesicles. See, e.g., FIGS. 2A-2B, 19A. Such captured or isolated entities may be further characterized to assess additional surface antigens or internal “payload” molecules present (i.e., nucleic acid molecules, lipids, sugars, polypeptides or functional fragments thereof, or anything else present in the cellular milieu that may be used as a biomarker), where one or more biomarkers provide a biosignature to assess a desired phenotype, such a s disease or condition. See, e.g., FIG. 2F. Therefore, aptamers of the invention are used not only to assess one or more microvesicle surface antigen of interest but are also used to separate a component present in a biological sample, where the components themselves can be further assessed to identify a candidate biosignature.

[0116] The methods of the invention can comprise multiplex analysis of at least 2, 3, 4, 5, 6, 7, 8, 9, 10, 11, 12, 13, 14, 15, 16, 17, 18, 19, 20, 25, 50, 75 or 100 different biomarkers. For example, an assay of a heterogeneous population of vesicles can be performed with a plurality of particles that are differentially labeled. There can be at least 2, 3, 4, 5, 6, 7, 8, 9, 10, 11, 12, 13, 14, 15, 16, 17, 18, 19, 20, 25, 50, 75 or 100 differentially labeled particles. The particles may be externally labeled, such as with a tag, or they may be intrinsically labeled. Each differentially labeled particle can be coupled to a capture agent, such as a binding agent, for a vesicle, resulting in capture of a vesicle. The multiple capture agents can be selected to characterize a phenotype of interest, including capture agents against general vesicle biomarkers, cell-of-origin specific biomarkers, and disease biomarkers. One or more biomarkers of the captured vesicle can then be detected by a plurality of binding agents. The binding agent can be directly labeled to facilitate detection. Alternatively, the binding agent is labeled by a secondary agent. For example, the binding agent may be an antibody for a biomarker on the vesicle, wherein the binding agent is linked to biotin. A secondary agent comprises streptavidin linked to a reporter and can be added to detect the biomarker. In some embodiments, the captured vesicle is assayed for at least 2, 3, 4, 5, 6, 7, 8, 9, 10, 11, 12, 13, 14, 15, 16, 17, 18, 19, 20, 25, 50, 75 or 100 different biomarkers. For example, multiple detectors, i.e., detection of multiple biomarkers of a captured vesicle or population of vesicles, can increase the signal obtained, permitted increased sensitivity, specificity, or both, and the use of smaller amounts of samples. Detection can be with more than one biomarker, including without limitation more than one vesicle marker such as in Table 3 or Table 4.

[0117] An immunoassay based method (e.g., sandwich assay) can be used to detect a biomarker of a vesicle. An example includes ELISA. A binding agent can be bound to a well. For example, a binding agent such as an aptamer or antibody to an antigen of a vesicle can be attached to a well. A biomarker on the captured vesicle can be detected based on the methods described herein. FIG. 2A shows an illustrative schematic for a sandwich-type of immunoassay. The capture agent can be against a vesicle antigen of interest, e.g., a general vesicle biomarker, a cell-of-origin marker, or a disease marker. In the figure, the captured vesicles are detected using fluorescently labeled binding agent (detection agent) against vesicle antigens of interest. Multiple capture binding agents can be used, e.g., in distinguishable addresses on an array or different wells of an immunoassay plate. The detection binding agents can be against the same antigen as the capture binding agent, or can be directed against other markers. The capture binding agent can be any useful binding agent, e.g., tethered aptamers, antibodies or lectins, and/or the detector antibodies can be similarly substituted, e.g., with detectable (e.g., labeled) aptamers, antibodies, lectins or other binding proteins or entities. In an embodiment, one or more capture agents to a general vesicle biomarker, a cell-of-origin marker, and/or a disease marker are used along with detection agents against general vesicle biomarker, such as tetraspanin molecules including without limitation one or more of CD9, CD63 and CD81, or other markers in Table 3 herein. Examples of microvesicle surface antigens are disclosed herein, e.g. in Tables 3 or 4, or are known in the art, and examples useful in methods and compositions of the invention are disclosed of International Patent Publication No. WO/2011/127219, entitled “Circulating Biomarkers for Disease” and filed Apr. 6, 2011.

[0118] FIG. 2D presents an illustrative schematic for analyzing vesicles according to the methods of the invention. Capture agents are used to capture vesicles, detectors are used to detect the captured vesicles, and the level or presence of the captured and detected microvesicles is used to characterize a phenotype. Capture agents, detectors and characterizing phenotypes can be any of those described herein. For example, capture agents include antibodies or aptamers tethered to a substrate that recognize a vesicle antigen of interest, detectors include labeled antibodies or aptamers to a vesicle antigen of interest, and characterizing a phenotype includes a diagnosis, prognosis, or theranosis of a disease. In the scheme shown in FIG. 2D i), a population of vesicles is captured with one or more capture agents against general vesicle biomarkers (200). The captured vesicles are then labeled with detectors against cell-of-origin biomarkers (201) and/or disease specific biomarkers (202). If only cell-of-origin detectors are used (201), the biosignature used to characterize the phenotype (203) can include the general vesicle markers (200) and the cell-of-origin biomarkers (201). If only disease detectors are used (202), the biosignature used to characterize the phenotype (203) can include the general vesicle markers (200) and the disease biomarkers (202). Alternately, detectors are used to detect both cell-of-origin biomarkers (201) and disease specific biomarkers (202). In this case, the biosignature used to characterize the phenotype (203) can include the general vesicle markers (200), the cell-of-origin biomarkers (201) and the disease biomarkers (202). The biomarkers combinations are selected to characterize the phenotype of interest and can be selected from the biomarkers and phenotypes described herein, e.g., in Tables 3 or 4.

[0119] In the scheme shown in FIG. 2D ii), a population of vesicles is captured with one or more capture agents against cell-of-origin biomarkers (210) and/or disease biomarkers (211). The captured vesicles are then detected using detectors against general vesicle biomarkers (212). If only cell-of-origin capture agents are used (210), the biosignature used to characterize the phenotype (213) can include the cell-of-origin biomarkers (210) and the general vesicle markers (212). If only disease biomarker capture agents are used (211), the biosignature used to characterize the phenotype (213) can include the disease biomarkers (211) and the general vesicle biomarkers (212). Alternately, capture agents to one or more cell-of-origin biomarkers (210) and one or more disease specific biomarkers (211) are used to capture vesicles. In this case, the biosignature used to characterize the phenotype (213) can include the cell-of-origin biomarkers (210), the disease biomarkers (211), and the general vesicle markers (213). The biomarkers combinations are selected to characterize the phenotype of interest and can be selected from the biomarkers and phenotypes described herein.

[0120] The methods of the invention comprise capture and detection of microvesicles of interest using any combination of useful biomarkers. For example, a microvesicle population can be captured using one or more binding agent to any desired combination of cell of origin, disease specific, or general vesicle markers. The captured microvesicles can then be detected using one or more binding agent to any desired combination of cell of origin, disease specific, or general vesicle markers. FIG. 2E represents a flow diagram of such configurations. Any one or more of a cell-of-origin biomarker (240), disease biomarkers (241), and general vesicle biomarker (242) is used to capture a microvesicle population. Thereafter, any one or more of a cell-of-origin biomarker (243), disease biomarkers (244), and general vesicle biomarker (245) is used to detect the captured microvesicle population. The biosignature of captured and detected microvesicles is then used to characterize a phenotype. The biomarkers combinations are selected to characterize the phenotype of interest and can be selected from the biomarkers and phenotypes described herein.

[0121] A microvesicle payload molecule can be assessed as a member of a biosignature panel. A payload molecule comprises any of the biological entities contained within a cell, cell fragment or vesicle membrane. These entities include without limitation nucleic acids, e.g., mRNA, microRNA, or DNA fragments; protein, e.g., soluble and membrane associated proteins; carbohydrates; lipids; metabolites; and various small molecules, e.g., hormones. The payload can be part of the cellular milieu that is encapsulated as a vesicle is formed in the cellular environment. In some embodiments of the invention, the payload is analyzed in addition to detecting vesicle surface antigens. Specific populations of vesicles can be captured as described above then the payload in the captured vesicles can be used to characterize a phenotype. For example, vesicles captured on a substrate can be further isolated to assess the payload therein. Alternately, the vesicles in a sample are detected and sorted without capture. The vesicles so detected can be further isolated to assess the payload therein. In an embodiment, vesicle populations are sorted by flow cytometry and the payload in the sorted vesicles is analyzed. In the scheme shown in FIG. 2F iv), a population of vesicles is captured and/or detected (220) using one or more of cell-of-origin biomarkers (220), disease biomarkers (221), and/or general vesicle markers (222). The payload of the isolated vesicles is assessed (223). A biosignature detected within the payload can be used to characterize a phenotype (224). In a non-limiting example, a vesicle population can be analyzed in a plasma sample from a patient using antibodies against one or more vesicle antigens of interest. The antibodies can be capture antibodies which are tethered to a substrate to isolate a desired vesicle population. Alternately, the antibodies can be directly labeled and the labeled vesicles isolated by sorting with flow cytometry. The presence or level of microRNA or mRNA extracted from the isolated vesicle population can be used to detect a biosignature. The biosignature is then used to diagnose, prognose or theranose the patient.

[0122] In other embodiments, vesicle or cellular payload is analyzed in a population (e.g., cells or vesicles) without first capturing or detected subpopulations of vesicles. For example, a cellular or extracellular vesicle population can be generally isolated from a sample using centrifugation, filtration, chromatography, or other techniques as described herein and known in the art. The payload of such sample components can be analyzed thereafter to detect a biosignature and characterize a phenotype. In the scheme shown in FIG. 2F v), a population of vesicles is isolated (230) and the payload of the isolated vesicles is assessed (231). A biosignature detected within the payload can be used to characterize a phenotype (232). In a non-limiting example, a vesicle population is isolated from a plasma sample from a patient using size exclusion and membrane filtration. The presence or level of microRNA or mRNA extracted from the vesicle population is used to detect a biosignature. The biosignature is then used to diagnose, prognose or theranose the patient.

[0123] The biomarkers used to detect a vesicle population can be selected to detect a microvesicle population of interest, e.g., a population of vesicles that provides a diagnosis, prognosis or theranosis of a selected condition or disease, including but not limited to a cancer, a premalignant condition, an inflammatory disease, an immune disease, an autoimmune disease or disorder, a cardiovascular disease or disorder, neurological disease or disorder, infectious disease or pain. See Section “Phenotypes” herein for more detail. In an embodiment, the biomarkers are selected from the group consisting of EpCam (epithelial cell adhesion molecule), CD9 (tetraspanin CD9 molecule), PCSA (prostate cell specific antigen, see Rokhlin et al., 5E10: a prostate-specific surface-reactive monoclonal antibody. Cancer Lett. 1998 131:129-36), CD63 (tetraspanin CD63 molecule), CD81 (tetraspanin CD81 molecule), PSMA (FOLH1, folate hydrolase (prostate-specific membrane antigen) 1), B7H3 (CD276 molecule), PSCA (prostate stem cell antigen), ICAM (intercellular adhesion molecule), STEAP (STEAP1, six transmembrane epithelial antigen of the prostate 1), KLK2 (kallikrein-related peptidase 2), SSX2 (synovial sarcoma, X breakpoint 2), SSX4 (synovial sarcoma, X breakpoint 4), PBP (prostatic binding protein), SPDEF (SAM pointed domain containing ets transcription factor), EGFR (epidermal growth factor receptor), and a combination thereof. One or more of these markers can provide a biosignature for a specific condition, such as to detect a cancer, including without limitation a carcinoma, a prostate cancer, a breast cancer, a lung cancer, a colorectal cancer, an ovarian cancer, melanoma, a brain cancer, or other type of cancer as disclosed herein. In an embodiment, a binding agent to one or more of these markers is used to capture a microvesicle population, and an aptamer of the invention is used to assist in detection of the capture vesicles as described herein. In other embodiments, an aptamer of the invention is used to capture a microvesicle population, and a binding agent to one or more of these markers is used to assist in detection of the capture vesicles as described herein. The binding agents can be any useful binding agent as disclosed herein or known in the art, e.g., antibodies or aptamers.

[0124] The methods of characterizing a phenotype can employ a combination of techniques to assess a component or population of components present in a biological sample of interest. For example, an aptamer of the invention can be used to assess a single cell, or a single extracellular vesicle or a population of cells or population of vesicles. A sample may be split into various aliquots, where each is analyzed separately. For example, protein content of one or more aliquot is determined and microRNA content of one or more other aliquot is determined. The protein content and microRNA content can be combined to characterize a phenotype. In another embodiment, a component present in a biological sample of interest is isolated and the payload therein is assessed (e.g., capture a population of subpopulation of vesicles using an aptamer of the invention and further assess nucleic acid or proteins present in the isolated vesicles).

[0125] In one embodiment, a population of vesicles with a given surface marker can be isolated by using a binding agent to a microvesicle surface marker. See, e.g., FIGS. 2A, 2B, 19A. The binding agent can be an aptamer that was identified to target the microvesicle surface marker using to the methods of the invention. The isolated vesicles is assessed for additional biomarkers such as surface content or payload, which can be contemporaneous to detection of the aptamer-specific target or the assessment of additional biomarkers can be before or subsequent to aptamer-specific target detection.

[0126] A biosignature can be detected qualitatively or quantitatively by detecting a presence, level or concentration of a circulating biomarker, e.g., a microRNA, protein, vesicle or other biomarker, as disclosed herein. These biosignature components can be detected using a number of techniques known to those of skill in the art. For example, a biomarker can be detected by microarray analysis, polymerase chain reaction (PCR) (including PCR-based methods such as real time polymerase chain reaction (RT-PCR), quantitative real time polymerase chain reaction (Q-PCR/qPCR) and the like), hybridization with allele-specific probes, enzymatic mutation detection, ligation chain reaction (LCR), oligonucleotide ligation assay (OLA), flow-cytometric heteroduplex analysis, chemical cleavage of mismatches, mass spectrometry, nucleic acid sequencing, single strand conformation polymorphism (SSCP), denaturing gradient gel electrophoresis (DGGE), temperature gradient gel electrophoresis (TGGE), restriction fragment polymorphisms, serial analysis of gene expression (SAGE), or combinations thereof. A biomarker, such as a nucleic acid, can be amplified prior to detection. A biomarker can also be detected by immunoassay, immunoblot, immunoprecipitation, enzyme-linked immunosorbent assay (ELISA; EIA), radioimmunoassay (RIA), flow cytometry, or electron microscopy (EM).

[0127] Biosignatures can be detected using aptamers of the invention that function as either as capture agents and detection agents, as described herein. A capture agent can comprise an antibody, aptamer or other entity which recognizes a biomarker and can be used for capturing the biomarker. Biomarkers that can be captured include circulating biomarkers, e.g., a protein, nucleic acid, lipid or biological complex in solution in a bodily fluid. Similarly, the capture agent can be used for capturing a vesicle. A detection agent can comprise an antibody or other entity which recognizes a biomarker and can be used for detecting the biomarker vesicle, or which recognizes a vesicle and is useful for detecting a vesicle. In some embodiments, the detection agent is labeled and the label is detected, thereby detecting the biomarker or vesicle. The detection agent can be a binding agent, e.g., an antibody or aptamer. In other embodiments, the detection agent comprises a small molecule such as a membrane protein labeling agent. See, e.g., the membrane protein labeling agents disclosed in Alroy et al., US. Patent Publication US 2005/0158708. In an embodiment, vesicles are isolated or captured as described herein, and one or more membrane protein labeling agent is used to detect the vesicles. In many cases, the antigen or other vesicle-moiety that is recognized by the capture and detection agents are interchangeable.

[0128] In a non-limiting embodiment, a vesicle having a cell-of-origin specific antigen on its surface and a cancer-specific antigen on its surface, is captured using a binding agent that is specific to a cells-specific antigen, e.g., by tethering the capture antibody or aptamer to a substrate, and then the vesicle is detected using a binding agent to a disease-specific antigen, e.g., by labeling the binding agent used for detection with a fluorescent dye and detecting the fluorescent radiation emitted by the dye.

[0129] It will be apparent to one of skill in the art that where the target molecule for a binding agent (such as an aptamer of the invention) is informative as to assessing a condition or disease, the same binding agent can be used to both capture a component comprising the target molecule (e.g., microvesicle surface antigen of interest) and also be modified to comprise a detectable label so as to detect the target molecule, e.g., binding agent₁-antigen-binding agent₂*, wherein the * signifies a detectable label; binding agent₁ and binding agent₂ may be the same binding agent or a different binding agent (e.g., same aptamer or different aptamer). In addition, binding agent₁ and binding agent₂ can be selected from wholly different categories of binding agents (e.g., antibody, aptamer, synthetic antibody, peptide-nucleic acid molecule, or any molecule that is configured to specifically bind to or associate with its target molecule). Such binding molecules can be selected solely based on their binding specificity for a target molecule. Examples of additional biomarkers that can be incorporated into the methods and compositions of the invention are known in the art, such as those disclosed in International Patent Publication Nos. WO/2012/174282 (Int'l Appl. PCT/US2012/042519 filed Jun. 14, 2012) and WO/2013/022995 (Int'l Appl. PCT/US2012/050030 filed Aug. 8, 2013). The detectable signal can itself be associated with a nucleic acid molecule that hybridizes with a stretch of nucleic acids present in each oligonucleotide comprising a probing library. The stretch can be the same or different as to one or more oligonucleotides in a library. The detectable signal can comprise fluorescence agents, including color-coded barcodes which are known, such as in U.S. Patent Application Pub. No. 20140371088, 2013017837, and 20120258870.

[0130] Techniques of detecting biomarkers or capturing sample components using an aptamer of the invention include the use of a planar substrate such as an array (e.g., biochip or microarray), with molecules immobilized to the substrate as capture agents that facilitate the detection of a particular biosignature. The array can be provided as part of a kit for assaying one or more biomarkers. Additional examples of binding agents described above and useful in the compositions and methods of the invention are disclosed in International Patent Publication No. WO/2011/127219, entitled “Circulating Biomarkers for Disease” and filed Apr. 6, 2011, which application is incorporated by reference in its entirety herein. Aptamers of the invention can be included in an array for detection and diagnosis of diseases including presymptomatic diseases. In some embodiments, an array comprises a custom array comprising biomolecules selected to specifically identify biomarkers of interest. Customized arrays can be modified to detect biomarkers that increase statistical performance, e.g., additional biomolecules that identifies a biosignature which lead to improved cross-validated error rates in multivariate prediction models (e.g., logistic regression, discriminant analysis, or regression tree models). In some embodiments, customized array(s) are constructed to study the biology of a disease, condition or syndrome and profile biosignatures in defined physiological states. Markers for inclusion on the customized array be chosen based upon statistical criteria, e.g., having a desired level of statistical significance in differentiating between phenotypes or physiological states. In some embodiments, standard significance of p-value=0.05 is chosen to exclude or include biomolecules on the microarray. The p-values can be corrected for multiple comparisons. As an illustrative example, nucleic acids extracted from samples from a subject with or without a disease can be hybridized to a high density microarray that binds to thousands of gene sequences. Nucleic acids whose levels are significantly different between the samples with or without the disease can be selected as biomarkers to distinguish samples as having the disease or not. A customized array can be constructed to detect the selected biomarkers. In some embodiments, customized arrays comprise low density microarrays, which refer to arrays with lower number of addressable binding agents, e.g., tens or hundreds instead of thousands. Low density arrays can be formed on a substrate. In some embodiments, customizable low density arrays use PCR amplification in plate wells, e.g., TaqMan® Gene Expression Assays (Applied Biosystems by Life Technologies Corporation, Carlsbad, Calif.).

[0131] An aptamer of the invention or other useful binding agent may be linked directly or indirectly to a solid surface or substrate. See, e.g., FIGS. 2A-2B, 9, 19A. A solid surface or substrate can be any physically separable solid to which a binding agent can be directly or indirectly attached including, but not limited to, surfaces provided by microarrays and wells, particles such as beads, columns, optical fibers, wipes, glass and modified or functionalized glass, quartz, mica, diazotized membranes (paper or nylon), polyformaldehyde, cellulose, cellulose acetate, paper, ceramics, metals, metalloids, semiconductive materials, quantum dots, coated beads or particles, other chromatographic materials, magnetic particles; plastics (including acrylics, polystyrene, copolymers of styrene or other materials, polypropylene, polyethylene, polybutylene, polyurethanes, Teflon material, etc.), polysaccharides, nylon or nitrocellulose, resins, silica or silica-based materials including silicon and modified silicon, carbon, metals, inorganic glasses, plastics, ceramics, conducting polymers (including polymers such as polypyrole and polyindole); micro or nanostructured surfaces such as nucleic acid tiling arrays, nanotube, nanowire, or nanoparticulate decorated surfaces; or porous surfaces or gels such as methacrylates, acrylamides, sugar polymers, cellulose, silicates, or other fibrous or stranded polymers. In addition, as is known the art, the substrate may be coated using passive or chemically-derivatized coatings with any number of materials, including polymers, such as dextrans, acrylamides, gelatins or agarose. Such coatings can facilitate the use of the array with a biological sample.

[0132] As provided in the examples, below, an aptamer or other useful binding agent can be conjugated to a detectable entity or label.

[0133] Appropriate labels include without limitation a magnetic label, a fluorescent moiety, an enzyme, a chemiluminescent probe, a metal particle, a non-metal colloidal particle, a polymeric dye particle, a pigment molecule, a pigment particle, an electrochemically active species, semiconductor nanocrystal or other nanoparticles including quantum dots or gold particles, fluorophores, quantum dots, or radioactive labels. Protein labels include green fluorescent protein (GFP) and variants thereof (e.g., cyan fluorescent protein and yellow fluorescent protein); and luminescent proteins such as luciferase, as described below. Radioactive labels include without limitation radioisotopes (radionuclides), such as ³H, ¹¹C, ¹⁴C, ¹⁸F, ³²P, ³⁵S, ⁶⁴Cu, ⁶⁸Ga, ⁸⁶Y, ⁹⁹Tc, ¹¹¹In, ¹²³I, ¹²⁴I, ¹²⁵I, ¹³¹I, ¹³³Xe, ¹⁷⁷Lu, ²¹¹At or ²¹³Bi. Fluorescent labels include without limitation a rare earth chelate (e.g., europium chelate), rhodamine; fluorescein types including without limitation FITC, 5-carboxyfluorescein, 6-carboxy fluorescein; a rhodamine type including without limitation TAMRA; dansyl; Lissamine; cyanines; phycoerythrins; Texas Red; Cy3, Cy5, dapoxyl, NBD, Cascade Yellow, dansyl, PyMPO, pyrene, 7-diethylaminocoumarin-3-carboxylic acid and other coumarin derivatives, Marina Blue™, Pacific Blue™, Cascade Blue™, 2-anthracenesulfonyl, PyMPO, 3,4,9,10-perylene-tetracarboxylic acid, 2,7-difluorofluorescein (Oregon Green™ 488-X), 5-carboxyfluorescein, Texas Red™-X, Alexa Fluor 430, 5-carboxytetramethylrhodamine (5-TAMRA), 6-carboxytetramethylrhodamine (6-TAMRA), BODIPY FL, bimane, and Alexa Fluor 350, 405, 488, 500, 514, 532, 546, 555, 568, 594, 610, 633, 647, 660, 680, 700, and 750, and derivatives thereof, among many others. See, e.g., “The Handbook—A Guide to Fluorescent Probes and Labeling Technologies,” Tenth Edition, available on the internet at probes (dot) invitrogen (dot) com/handbook. The fluorescent label can be one or more of FAM, dRHO, 5-FAM, 6FAM, dR6G, JOE, HEX, VIC, TET, dTAMRA, TAMRA, NED, dROX, PET, BHQ, Gold540 and LIZ.

[0134] Using conventional techniques, an aptamer can be directly or indirectly labeled, e.g., the label is attached to the aptamer through biotin-streptavidin (e.g., synthesize a biotinylated aptamer, which is then capable of binding a streptavidin molecule that is itself conjugated to a detectable label; non-limiting example is streptavidin, phycoerythrin conjugated (SAPE)). Methods for chemical coupling using multiple step procedures include biotinylation, coupling of trinitrophenol (TNP) or digoxigenin using for example succinimide esters of these compounds. Biotinylation can be accomplished by, for example, the use of D-biotinyl-N-hydroxysuccinimide. Succinimide groups react effectively with amino groups at pH values above 7, and preferentially between about pH 8.0 and about pH 8.5. Alternatively, an aptamer is not labeled, but is later contacted with a second antibody that is labeled after the first antibody is bound to an antigen of interest.

[0135] Various enzyme-substrate labels may also be used in conjunction with a composition or method of the invention. Such enzyme-substrate labels are available commercially (e.g., U.S. Pat. No. 4,275,149). The enzyme generally catalyzes a chemical alteration of a chromogenic substrate that can be measured using various techniques. For example, the enzyme may catalyze a color change in a substrate, which can be measured spectrophotometrically. Alternatively, the enzyme may alter the fluorescence or chemiluminescence of the substrate. Examples of enzymatic labels include luciferases (e.g., firefly luciferase and bacterial luciferase; U.S. Pat. No. 4,737,456), luciferin, 2,3-dihydrophthalazinediones, malate dehydrogenase, urease, peroxidase such as horseradish peroxidase (HRP), alkaline phosphatase (AP), β-galactosidase, glucoamylase, lysozyme, saccharide oxidases (e.g., glucose oxidase, galactose oxidase, and glucose-6-phosphate dehydrogenase), heterocyclic oxidases (such as uricase and xanthine oxidase), lactoperoxidase, microperoxidase, and the like. Examples of enzyme-substrate combinations include, but are not limited to, horseradish peroxidase (HRP) with hydrogen peroxidase as a substrate, wherein the hydrogen peroxidase oxidizes a dye precursor (e.g., orthophenylene diamine (OPD) or 3,3′,5,5′-tetramethylbenzidine hydrochloride (TMB)); alkaline phosphatase (AP) with para-nitrophenyl phosphate as chromogenic substrate; and β-D-galactosidase (β-D-Gal) with a chromogenic substrate (e.g., p-nitrophenyl-β-D-galactosidase) or fluorogenic substrate 4-methylumbelliferyl-β-D-galactosidase.

[0136] Aptamer(s) can be linked to a substrate such as a planar substrate. A planar array generally contains addressable locations (e.g., pads, addresses, or micro-locations) of biomolecules in an array format. The size of the array will depend on the composition and end use of the array. Arrays can be made containing from 2 different molecules to many thousands. Generally, the array comprises from two to as many as 100,000 or more molecules, depending on the end use of the array and the method of manufacture. A microarray for use with the invention comprises at least one biomolecule that identifies or captures a biomarker present in a biosignature of interest, e.g., a microRNA or other biomolecule or vesicle that makes up the biosignature. In some arrays, multiple substrates are used, either of different or identical compositions. Accordingly, planar arrays may comprise a plurality of smaller substrates.

[0137] The present invention can make use of many types of arrays for detecting a biomarker, e.g., a biomarker associated with a biosignature of interest. Useful arrays or microarrays include without limitation DNA microarrays, such as cDNA microarrays, oligonucleotide microarrays and SNP microarrays, microRNA arrays, protein microarrays, antibody microarrays, tissue microarrays, cellular microarrays (also called transfection microarrays), chemical compound microarrays, and carbohydrate arrays (glycoarrays). These arrays are described in more detail above. In some embodiments, microarrays comprise biochips that provide high-density immobilized arrays of recognition molecules (e.g., aptamers or antibodies), where biomarker binding is monitored indirectly (e.g., via fluorescence).

[0138] An array or microarray that can be used to detect one or more biomarkers of a biosignature and comprising one or more aptamers of the invention can be made according to the methods described in U.S. Pat. Nos. 6,329,209; 6,365,418; 6,406,921; 6,475,808; and 6,475,809, and U.S. patent application Ser. No. 10/884,269, each of which is herein incorporated by reference in its entirety. Custom arrays to detect specific selections of sets of biomarkers described herein can be made using the methods described in these patents. Commercially available microarrays can also be used to carry out the methods of the invention, including without limitation those from Affymetrix (Santa Clara, Calif.), Illumina (San Diego, Calif.), Agilent (Santa Clara, Calif.), Exiqon (Denmark), or Invitrogen (Carlsbad, Calif.). Custom and/or commercial arrays include arrays for detection proteins, nucleic acids, and other biological molecules and entities (e.g., cells, vesicles, virii) as described herein.

[0139] In some embodiments, multiple capture molecules are disposed on an array, e.g., proteins, peptides or additional nucleic acid molecules. In certain embodiments, the proteins are immobilized using methods and materials that minimize the denaturing of the proteins, that minimize alterations in the activity of the proteins, or that minimize interactions between the protein and the surface on which they are immobilized. The capture molecules can comprise one or more aptamer of the invention. In one embodiment, an array is constructed for the hybridization of a pool of aptamers. The array can then be used to identify pool members that bind a sample, thereby facilitating characterization of a phenotype. See FIGS. 19B-19C and related disclosure for further details.

[0140] Array surfaces useful may be of any desired shape, form, or size. Non-limiting examples of surfaces include chips, continuous surfaces, curved surfaces, flexible surfaces, films, plates, sheets, or tubes. Surfaces can have areas ranging from approximately a square micron to approximately 500 cm². The area, length, and width of surfaces may be varied according to the requirements of the assay to be performed. Considerations may include, for example, ease of handling, limitations of the material(s) of which the surface is formed, requirements of detection systems, requirements of deposition systems (e.g., arrayers), or the like.

[0141] In certain embodiments, it is desirable to employ a physical means for separating groups or arrays of binding islands or immobilized biomolecules: such physical separation facilitates exposure of different groups or arrays to different solutions of interest. Therefore, in certain embodiments, arrays are situated within microwell plates having any number of wells. In such embodiments, the bottoms of the wells may serve as surfaces for the formation of arrays, or arrays may be formed on other surfaces and then placed into wells. In certain embodiments, such as where a surface without wells is used, binding islands may be formed or molecules may be immobilized on a surface and a gasket having holes spatially arranged so that they correspond to the islands or biomolecules may be placed on the surface. Such a gasket is preferably liquid tight. A gasket may be placed on a surface at any time during the process of making the array and may be removed if separation of groups or arrays is no longer desired.

[0142] In some embodiments, the immobilized molecules can bind to one or more biomarkers or vesicles present in a biological sample contacting the immobilized molecules. In some embodiments, the immobilized molecules modify or are modified by molecules present in the one or more vesicles contacting the immobilized molecules. Contacting the sample typically comprises overlaying the sample upon the array.

[0143] Modifications or binding of molecules in solution or immobilized on an array can be detected using detection techniques known in the art. Examples of such techniques include immunological techniques such as competitive binding assays and sandwich assays; fluorescence detection using instruments such as confocal scanners, confocal microscopes, or CCD-based systems and techniques such as fluorescence, fluorescence polarization (FP), fluorescence resonant energy transfer (FRET), total internal reflection fluorescence (TIRF), fluorescence correlation spectroscopy (FCS); colorimetric/spectrometric techniques; surface plasmon resonance, by which changes in mass of materials adsorbed at surfaces are measured; techniques using radioisotopes, including conventional radioisotope binding and scintillation proximity assays (SPA); mass spectroscopy, such as matrix-assisted laser desorption/ionization mass spectroscopy (MALDI) and MALDI-time of flight (TOF) mass spectroscopy; ellipsometry, which is an optical method of measuring thickness of protein films; quartz crystal microbalance (QCM), a very sensitive method for measuring mass of materials adsorbing to surfaces; scanning probe microscopies, such as atomic force microscopy (AFM), scanning force microscopy (SFM) or scanning electron microscopy (SEM); and techniques such as electrochemical, impedance, acoustic, microwave, and IR/Raman detection. See, e.g., Mere L, et al., “Miniaturized FRET assays and microfluidics: key components for ultra-high-throughput screening,” Drug Discovery Today 4(8):363-369 (1999), and references cited therein; Lakowicz J R, Principles of Fluorescence Spectroscopy, 2nd Edition, Plenum Press (1999), or Jain K K: Integrative Omics, Pharmacoproteomics, and Human Body Fluids. In: Thongboonkerd V, ed., ed. Proteomics of Human Body Fluids: Principles, Methods and Applications. Volume 1: Totowa, N.J.: Humana Press, 2007, each of which is herein incorporated by reference in its entirety.

[0144] Microarray technology can be combined with mass spectroscopy (MS) analysis and other tools. Electrospray interface to a mass spectrometer can be integrated with a capillary in a microfluidics device. For example, one commercially available system contains eTag reporters that are fluorescent labels with unique and well-defined electrophoretic mobilities; each label is coupled to biological or chemical probes via cleavable linkages. The distinct mobility address of each eTag reporter allows mixtures of these tags to be rapidly deconvoluted and quantitated by capillary electrophoresis. This system allows concurrent gene expression, protein expression, and protein function analyses from the same sample Jain K K: Integrative Omics, Pharmacoproteomics, and Human Body Fluids. In: Thongboonkerd V, ed., ed. Proteomics of Human Body Fluids: Principles, Methods and Applications. Volume 1: Totowa, N.J.: Humana Press, 2007, which is herein incorporated by reference in its entirety.

[0145] A biochip can include components for a microfluidic or nanofluidic assay. A microfluidic device can be used for isolating or analyzing biomarkers, such as determining a biosignature. Microfluidic systems allow for the miniaturization and compartmentalization of one or more processes for isolating, capturing or detecting a vesicle, detecting a microRNA, detecting a circulating biomarker, detecting a biosignature, and other processes. The microfluidic devices can use one or more detection reagents in at least one aspect of the system, and such a detection reagent can be used to detect one or more biomarkers. In one embodiment, the device detects a biomarker on an isolated or bound vesicle. Various probes, antibodies, proteins, or other binding agents can be used to detect a biomarker within the microfluidic system. The detection agents may be immobilized in different compartments of the microfluidic device or be entered into a hybridization or detection reaction through various channels of the device.

[0146] A vesicle in a microfluidic device can be lysed and its contents detected within the microfluidic device, such as proteins or nucleic acids, e.g., DNA or RNA such as miRNA or mRNA. The nucleic acid may be amplified prior to detection, or directly detected, within the microfluidic device. Thus microfluidic system can also be used for multiplexing detection of various biomarkers. In an embodiment, vesicles are captured within the microfluidic device, the captured vesicles are lysed, and a biosignature of microRNA from the vesicle payload is determined. The biosignature can further comprise the capture agent used to capture the vesicle.

[0147] Novel nanofabrication techniques are opening up the possibilities for biosensing applications that rely on fabrication of high-density, precision arrays, e.g., nucleotide-based chips and protein arrays otherwise known as heterogeneous nanoarrays. Nanofluidics allows a further reduction in the quantity of fluid analyte in a microchip to nanoliter levels, and the chips used here are referred to as nanochips. See, e.g., Unger M et al., Biotechniques 1999; 27(5):1008-14, Kartalov E P et al., Biotechniques 2006; 40(1):85-90, each of which are herein incorporated by reference in their entireties. Commercially available nanochips currently provide simple one step assays such as total cholesterol, total protein or glucose assays that can be run by combining sample and reagents, mixing and monitoring of the reaction. Gel-free analytical approaches based on liquid chromatography (LC) and nanoLC separations (Cutillas et al. Proteomics, 2005; 5:101-112 and Cutillas et al., Mol Cell Proteomics 2005;4:1038-1051, each of which is herein incorporated by reference in its entirety) can be used in combination with the nanochips.

[0148] An array suitable for identifying a disease, condition, syndrome or physiological status can be included in a kit. A kit can include, an aptamer of the invention, including as non-limiting examples, one or more reagents useful for preparing molecules for immobilization onto binding islands or areas of an array, reagents useful for detecting binding of a vesicle to immobilized molecules, and instructions for use.

[0149] Further provided herein is a rapid detection device that facilitates the detection of a particular biosignature in a biological sample. The device can integrate biological sample preparation with polymerase chain reaction (PCR) on a chip. The device can facilitate the detection of a particular biosignature of a vesicle in a biological sample, and an example is provided as described in Pipper et al., Angewandte Chemie, 47(21), p. 3900-3904 (2008), which is herein incorporated by reference in its entirety. A biosignature can be incorporated using micro-/nano-electrochemical system (MEMS/NEMS) sensors and oral fluid for diagnostic applications as described in Li et al., Adv Dent Res 18(1): 3-5 (2005), which is herein incorporated by reference in its entirety.

[0150] Particle Arrays

[0151] As an alternative to planar arrays, assays using particles, such as bead based assays are also capable of use with an aptamer of the invention. Aptamers are easily conjugated with commercially available beads. See, e.g., Srinivas et al. Anal. Chem. 2011 Oct. 21, Aptamer functionalized Microgel Particles for Protein Detection; See also, review article on aptamers as therapeutic and diagnostic agents, Brody and Gold, Rev. Mol. Biotech. 2000, 74:5-13.

[0152] Multiparametric assays or other high throughput detection assays using bead coatings with cognate ligands and reporter molecules with specific activities consistent with high sensitivity automation can be used. In a bead based assay system, a binding agent for a biomarker or vesicle, such as a capture agent (e.g. capture antibody), can be immobilized on an addressable microsphere. Each binding agent for each individual binding assay can be coupled to a distinct type of microsphere (i.e., microbead) and the assay reaction takes place on the surface of the microsphere, such as depicted in FIG. 2B. A binding agent for a vesicle can be a capture antibody coupled to a bead. Dyed microspheres with discrete fluorescence intensities are loaded separately with their appropriate binding agent or capture probes. The different bead sets carrying different binding agents can be pooled as desired to generate custom bead arrays. Bead arrays are then incubated with the sample in a single reaction vessel to perform the assay.

[0153] Bead-based assays can also be used with one or more aptamers of the invention. A bead substrate can provide a platform for attaching one or more binding agents, including aptamer(s). For multiplexing, multiple different bead sets (e.g., Illumina, Luminex) can have different binding agents (specific to different target molecules). For example, a bead can be conjugated to an aptamer of the invention used to detect the presence (quantitatively or qualitatively) of an antigen of interest, or it can also be used to isolate a component present in a selected biological sample (e.g., cell, cell-fragment or vesicle comprising the target molecule to which the aptamer is configured to bind or associate). Any molecule of organic origin can be successfully conjugated to a polystyrene bead through use of commercially available kits.

[0154] One or more aptamers of the invention can be used with any bead based substrate, including but not limited to magnetic capture method, fluorescence activated cell sorting (FACS) or laser cytometry. Magnetic capture methods can include, but are not limited to, the use of magnetically activated cell sorter (MACS) microbeads or magnetic columns. Examples of bead or particle based methods that can be modified to use an aptamer of the invention include methods and bead systems described in U.S. Pat. Nos. 4,551,435, 4,795,698, 4,925,788, 5,108,933, 5,186,827, 5,200,084 or 5,158,871; 7,399,632; 8,124,015; 8,008,019; 7,955,802; 7,445,844; 7,274,316; 6,773,812; 6,623,526; 6,599,331; 6,057,107; 5,736,330; International Patent Publication No. WO/2012/174282; WO/1993/022684.

[0155] Flow Cytometry

[0156] Isolation or detection of circulating biomarkers, e.g., protein antigens, from a biological sample, or of the biomarker-comprising cells, cell fragments or vesicles may also be achieved using an aptamer of the invention in a cytometry process. As a non-limiting example, aptamers of the invention can be used in an assay comprising using a particle such as a bead or microsphere The invention provides aptamers as binding agents, which may be conjugated to the particle. Flow cytometry can be used for sorting microscopic particles suspended in a stream of fluid. As particles pass through they can be selectively charged and on their exit can be deflected into separate paths of flow. It is therefore possible to separate populations from an original mix, such as a biological sample, with a high degree of accuracy and speed. Flow cytometry allows simultaneous multiparametric analysis of the physical and/or chemical characteristics of single cells flowing through an optical/electronic detection apparatus. A beam of light, usually laser light, of a single frequency (color) is directed onto a hydrodynamically focused stream of fluid. A number of detectors are aimed at the point where the stream passes through the light beam; one in line with the light beam (Forward Scatter or FSC) and several perpendicular to it (Side Scatter or SSC) and one or more fluorescent detectors.

[0157] Each suspended particle passing through the beam scatters the light in some way, and fluorescent chemicals in the particle may be excited into emitting light at a lower frequency than the light source. This combination of scattered and fluorescent light is picked up by the detectors, and by analyzing fluctuations in brightness at each detector (one for each fluorescent emission peak), it is possible to deduce various facts about the physical and chemical structure of each individual particle. FSC correlates with the cell size and SSC depends on the inner complexity of the particle, such as shape of the nucleus, the amount and type of cytoplasmic granules or the membrane roughness. Some flow cytometers have eliminated the need for fluorescence and use only light scatter for measurement.

[0158] Flow cytometers can analyze several thousand particles every second in “real time” and can actively separate out and isolate particles having specified properties. They offer high-throughput automated quantification, and separation, of the set parameters for a high number of single cells during each analysis session. Flow cytometers can have multiple lasers and fluorescence detectors, allowing multiple labels to be used to more precisely specify a target population by their phenotype. Thus, a flow cytometer, such as a multicolor flow cytometer, can be used to detect one or more vesicles with multiple fluorescent labels or colors. In some embodiments, the flow cytometer can also sort or isolate different vesicle populations, such as by size or by different markers.

[0159] The flow cytometer may have one or more lasers, such as 1, 2, 3, 4, 5, 6, 7, 8, 9, 10 or more lasers. In some embodiments, the flow cytometer can detect more than one color or fluorescent label, such as at least 2, 3, 4, 5, 6, 7, 8, 9, 10, 11, 12, 13, 14, 15, 16, 17, 18, 19, or 20 different colors or fluorescent labels. For example, the flow cytometer can have at least 2, 3, 4, 5, 6, 7, 8, 9, 10, 11, 12, 13, 14, 15, 16, 17, 18, 19, or 20 fluorescence detectors.

[0160] Examples of commercially available flow cytometers that can be used to detect or analyze one or more vesicles, to sort or separate different populations of vesicles, include, but are not limited to the MoFlo™ XDP Cell Sorter (Beckman Coulter, Brea, Calif.), MoFlo™ Legacy Cell Sorter (Beckman Coulter, Brea, Calif.), BD FACSAria™ Cell Sorter (BD Biosciences, San Jose, Calif.), BD™ LSRII (BD Biosciences, San Jose, Calif.), and BD FACSCalibur™ (BD Biosciences, San Jose, Calif.). Use of multicolor or multi-fluor cytometers can be used in multiplex analysis of vesicles, as further described below. In some embodiments, the flow cytometer can sort, and thereby collect or sort more than one population of vesicles based one or more characteristics. For example, two populations of vesicles differ in size, such that the vesicles within each population have a similar size range and can be differentially detected or sorted. In another embodiment, two different populations of vesicles are differentially labeled.

[0161] The data resulting from flow-cytometers can be plotted in 1 dimension to produce histograms or seen in 2 dimensions as dot plots or in 3 dimensions with newer software. The regions on these plots can be sequentially separated by a series of subset extractions which are termed gates. Specific gating protocols exist for diagnostic and clinical purposes especially in relation to hematology. The plots are often made on logarithmic scales. Because different fluorescent dye's emission spectra overlap, signals at the detectors have to be compensated electronically as well as computationally. Fluorophores for labeling biomarkers may include those described in Ormerod, Flow Cytometry 2nd ed., Springer-Verlag, New York (1999), and in Nida et al., Gynecologic Oncology 2005; 4 889-894 which is incorporated herein by reference. In a multiplexed assay, including but not limited to a flow cytometry assay, one or more different target molecules can be assessed, wherein at least one of the target molecules is a microvesicle surface antigen assessed using an aptamer of the invention.

[0162] Microfluidics

[0163] One or more aptamer of the invention can be disposed on any useful planar or bead substrate. In one aspect of the invention one or more aptamer of the invention is disposed on a microfluidic device, thereby facilitating assessing, characterizing or isolating a component of a biological sample comprising a polypeptide antigen of interest or a functional fragment thereof. For example, the circulating antigen or a cell, cell fragment or cell-derived vesicles comprising the antigen can be assessed using one or more aptamers of the invention (alternatively along with additional binding agents). Microfluidic devices, which may also be referred to as “lab-on-a-chip” systems, biomedical micro-electro-mechanical systems (bioMEMs), or multicomponent integrated systems, can be used for isolating and analyzing a vesicle. Such systems miniaturize and compartmentalize processes that allow for binding of vesicles, detection of biosignatures, and other processes.

[0164] A microfluidic device can also be used for isolation of a vesicle through size differential or affinity selection. For example, a microfluidic device can use one more channels for isolating a vesicle from a biological sample based on size or by using one or more binding agents for isolating a vesicle from a biological sample. A biological sample can be introduced into one or more microfluidic channels, which selectively allows the passage of a vesicle. The selection can be based on a property of the vesicle, such as the size, shape, deformability, or biosignature of the vesicle.

[0165] In one embodiment, a heterogeneous population of vesicles can be introduced into a microfluidic device, and one or more different homogeneous populations of vesicles can be obtained. For example, different channels can have different size selections or binding agents to select for different vesicle populations. Thus, a microfluidic device can isolate a plurality of vesicles wherein at least a subset of the plurality of vesicles comprises a different biosignature from another subset of the plurality of vesicles. For example, the microfluidic device can isolate at least 2, 3, 4, 5, 6, 7, 8, 9, 10, 15, 20, 25, 30, 40, 50, 60, 70, 80, 90, or 100 different subsets of vesicles, wherein each subset of vesicles comprises a different biosignature.

[0166] In some embodiments, the microfluidic device can comprise one or more channels that permit further enrichment or selection of a vesicle. A population of vesicles that has been enriched after passage through a first channel can be introduced into a second channel, which allows the passage of the desired vesicle or vesicle population to be further enriched, such as through one or more binding agents present in the second channel.

[0167] Array-based assays and bead-based assays can be used with microfluidic device. For example, the binding agent can be coupled to beads and the binding reaction between the beads and vesicle can be performed in a microfluidic device. Multiplexing can also be performed using a microfluidic device. Different compartments can comprise different binding agents for different populations of vesicles, where each population is of a different cell-of-origin specific vesicle population. In one embodiment, each population has a different biosignature. The hybridization reaction between the microsphere and vesicle can be performed in a microfluidic device and the reaction mixture can be delivered to a detection device. The detection device, such as a dual or multiple laser detection system can be part of the microfluidic system and can use a laser to identify each bead or microsphere by its color-coding, and another laser can detect the hybridization signal associated with each bead.

[0168] Any appropriate microfluidic device can be used in the methods of the invention. Examples of microfluidic devices that may be used, or adapted for use with vesicles, include but are not limited to those described in U.S. Pat. Nos. 7,591,936, 7,581,429, 7,579,136, 7,575,722, 7,568,399, 7,552,741, 7,544,506, 7,541,578, 7,518,726, 7,488,596, 7,485,214, 7,467,928, 7,452,713, 7,452,509, 7,449,096, 7,431,887, 7,422,725, 7,422,669, 7,419,822, 7,419,639, 7,413,709, 7,411,184, 7,402,229, 7,390,463, 7,381,471, 7,357,864, 7,351,592, 7,351,380, 7,338,637, 7,329,391, 7,323,140, 7,261,824, 7,258,837, 7,253,003, 7,238,324, 7,238,255, 7,233,865, 7,229,538, 7,201,881, 7,195,986, 7,189,581, 7,189,580, 7,189,368, 7,141,978, 7,138,062, 7,135,147, 7,125,711, 7,118,910, 7,118,661, 7,640,947, 7,666,361, 7,704,735; and International Patent Publication WO 2010/072410; each of which patents or applications are incorporated herein by reference in their entirety. Another example for use with methods disclosed herein is described in Chen et al., “Microfluidic isolation and transcriptome analysis of serum vesicles,” Lab on a Chip, Dec. 8, 2009 DOI: 10.1039/b916199f.

[0169] Other microfluidic devices for use with the invention include devices comprising elastomeric layers, valves and pumps, including without limitation those disclosed in U.S. Pat. Nos. 5,376,252, 6,408,878, 6,645,432, 6,719,868, 6,793,753, 6,899,137, 6,929,030, 7,040,338, 7,118,910, 7,144,616, 7,216,671, 7,250,128, 7,494,555, 7,501,245, 7,601,270, 7,691,333, 7,754,010, 7,837,946; U.S. Patent Application Nos. 2003/0061687, 2005/0084421, 2005/0112882, 2005/0129581, 2005/0145496, 2005/0201901, 2005/0214173, 2005/0252773, 2006/0006067; and EP Patent Nos. 0527905 and 1065378; each of which application is herein incorporated by reference. In some instances, much or all of the devices are composed of elastomeric material. Certain devices are designed to conduct thermal cycling reactions (e.g., PCR) with devices that include one or more elastomeric valves to regulate solution flow through the device. The devices can comprise arrays of reaction sites thereby allowing a plurality of reactions to be performed. Thus, the devices can be used to assess circulating microRNAs in a multiplex fashion, including microRNAs isolated from vesicles. In an embodiment, the microfluidic device comprises (a) a first plurality of flow channels formed in an elastomeric substrate; (b) a second plurality of flow channels formed in the elastomeric substrate that intersect the first plurality of flow channels to define an array of reaction sites, each reaction site located at an intersection of one of the first and second flow channels; (c) a plurality of isolation valves disposed along the first and second plurality of flow channels and spaced between the reaction sites that can be actuated to isolate a solution within each of the reaction sites from solutions at other reaction sites, wherein the isolation valves comprise one or more control channels that each overlay and intersect one or more of the flow channels; and (d) means for simultaneously actuating the valves for isolating the reaction sites from each other. Various modifications to the basic structure of the device are envisioned within the scope of the invention. MicroRNAs can be detected in each of the reaction sites by using PCR methods. For example, the method can comprise the steps of the steps of: (i) providing a microfluidic device, the microfluidic device comprising: a first fluidic channel having a first end and a second end in fluid communication with each other through the channel; a plurality of flow channels, each flow channel terminating at a terminal wall; wherein each flow channel branches from and is in fluid communication with the first fluidic channel, wherein an aqueous fluid that enters one of the flow channels from the first fluidic channel can flow out of the flow channel only through the first fluidic channel; and, an inlet in fluid communication with the first fluidic channel, the inlet for introducing a sample fluid; wherein each flow channel is associated with a valve that when closed isolates one end of the flow channel from the first fluidic channel, whereby an isolated reaction site is formed between the valve and the terminal wall; a control channel; wherein each the valve is a deflectable membrane which is deflected into the flow channel associated with the valve when an actuating force is applied to the control channel, thereby closing the valve; and wherein when the actuating force is applied to the control channel a valve in each of the flow channels is closed, so as to produce the isolated reaction site in each flow channel; (ii) introducing the sample fluid into the inlet, the sample fluid filling the flow channels; (iii) actuating the valve to separate the sample fluid into the separate portions within the flow channels; (iv) amplifying the nucleic acid in the sample fluid; (v) analyzing the portions of the sample fluid to determine whether the amplifying produced the reaction. The sample fluid can contain an amplifiable nucleic acid target, e.g., a microRNA, and the conditions can be polymerase chain reaction (PCR) conditions, so that the reaction results in a PCR product being formed.

[0170] The microfluidic device can have one or more binding agents attached to a surface in a channel, or present in a channel. For example, the microchannel can have one or more capture agents, such as a capture agent for a breast tissue related antigen in Table 3, one or more general microvesicle antigen in Table 3 or a cell-of-origin or cancer related antigen in Table 4, including without limitation EpCam, CD9, PCSA, CD63, CD81, PSMA, B7H3, PSCA, ICAM, STEAP, KLK2, SSX2, SSX4, PBP, SPDEF, and EGFR. The capture agent may be an aptamer selected by the methods of the invention. The surface of the channel can also be contacted with a blocking aptamer. In one embodiment, a microchannel surface is treated with avidin and a capture agent, such as an antibody, that is biotinylated can be injected into the channel to bind the avidin. In other embodiments, the capture agents are present in chambers or other components of a microfluidic device. The capture agents can also be attached to beads that can be manipulated to move through the microfluidic channels. In one embodiment, the capture agents are attached to magnetic beads. The beads can be manipulated using magnets.

[0171] A biological sample can be flowed into the microfluidic device, or a microchannel, at rates such as at least about 1, 2, 3, 4, 5, 6, 7, 8, 9, 10, 11, 12, 13, 14, 15, 16, 17, 18, 19, 20, 25, 30, 35, 40, 45, or 50 μl per minute, such as between about 1-50, 5-40, 5-30, 3-20 or 5-15 μl per minute. One or more vesicles can be captured and directly detected in the microfluidic device. Alternatively, the captured vesicle may be released and exit the microfluidic device prior to analysis. In another embodiment, one or more captured vesicles are lysed in the microchannel and the lysate can be analyzed, e.g., to examine payload within the vesicles. Lysis buffer can be flowed through the channel and lyse the captured vesicles. For example, the lysis buffer can be flowed into the device or microchannel at rates such as at least about a, 2, 3, 4, 5, 6, 7, 8, 9, 10, 11, 12, 13, 14, 15, 16, 17, 18, 19, 20, 25, 26, 27, 28, 29, 30, 35, 40, 45, or 50 μl per minute, such as between about 1-50, 5-40, 10-30, 5-30 or 10-35 μl per minute. The lysate can be collected and analyzed, such as performing RT-PCR, PCR, mass spectrometry, Western blotting, or other assays, to detect one or more biomarkers of the vesicle.

### Phenotypes

[0172] Disclosed herein are products and processes for characterizing a phenotype using the methods and compositions of the invention. The term “phenotype” as used herein can mean any trait or characteristic that is attributed to a biomarker profile that is identified using in part or in whole the compositions and/or methods of the invention. For example, a phenotype can be a diagnostic, prognostic or theranostic determination based on a characterized biomarker profile for a sample obtained from a subject. A phenotype can be any observable characteristic or trait of, such as a disease or condition, a stage of a disease or condition, susceptibility to a disease or condition, prognosis of a disease stage or condition, a physiological state, or response/potential response to therapeutics. A phenotype can result from a subject's genetic makeup as well as the influence of environmental factors and the interactions between the two, as well as from epigenetic modifications to nucleic acid sequences.

[0173] A phenotype in a subject can be characterized by obtaining a biological sample from a subject and analyzing the sample using the compositions and/or methods of the invention. For example, characterizing a phenotype for a subject or individual can include detecting a disease or condition (including pre-symptomatic early stage detecting), determining a prognosis, diagnosis, or theranosis of a disease or condition, or determining the stage or progression of a disease or condition. Characterizing a phenotype can include identifying appropriate treatments or treatment efficacy for specific diseases, conditions, disease stages and condition stages, predictions and likelihood analysis of disease progression, particularly disease recurrence, metastatic spread or disease relapse. A phenotype can also be a clinically distinct type or subtype of a condition or disease, such as a cancer or tumor. Phenotype determination can also be a determination of a physiological condition, or an assessment of organ distress or organ rejection, such as post-transplantation. The compositions and methods described herein allow assessment of a subject on an individual basis, which can provide benefits of more efficient and economical decisions in treatment.

[0174] In an aspect, the invention relates to the analysis of biomarkers such as microvesicles to provide a diagnosis, prognosis, and/or theranosis of a disease or condition. Theranostics includes diagnostic testing that provides the ability to affect therapy or treatment of a disease or disease state. Theranostics testing provides a theranosis in a similar manner that diagnostics or prognostic testing provides a diagnosis or prognosis, respectively. As used herein, theranostics encompasses any desired form of therapy related testing, including predictive medicine, personalized medicine, integrated medicine, pharmacodiagnostics and Dx/Rx partnering. Therapy related tests can be used to predict and assess drug response in individual subjects, i.e., to provide personalized medicine. Predicting a drug response can be determining whether a subject is a likely responder or a likely non-responder to a candidate therapeutic agent, e.g., before the subject has been exposed or otherwise treated with the treatment. Assessing a drug response can be monitoring a response to a drug, e.g., monitoring the subject's improvement or lack thereof over a time course after initiating the treatment. Therapy related tests are useful to select a subject for treatment who is particularly likely to benefit from the treatment or to provide an early and objective indication of treatment efficacy in an individual subject. Thus, analysis using the compositions and methods of the invention may indicate that treatment should be altered to select a more promising treatment, thereby avoiding the great expense of delaying beneficial treatment and avoiding the financial and morbidity costs of administering an ineffective drug(s).

[0175] Thus, the compositions and methods of the invention may help predict whether a subject is likely to respond to a treatment for a disease or disorder. Characterizating a phenotype includes predicting the responder/non-responder status of the subject, wherein a responder responds to a treatment for a disease and a non-responder does not respond to the treatment. Biomarkers such as microvesicles can be analyzed in the subject and compared against that of previous subjects that were known to respond or not to a treatment. If the biomarker profile in the subject more closely aligns with that of previous subjects that were known to respond to the treatment, the subject can be characterized, or predicted, as a responder to the treatment. Similarly, if the biomarker profile in the subject more closely aligns with that of previous subjects that did not respond to the treatment, the subject can be characterized, or predicted as a non-responder to the treatment. The treatment can be for any appropriate disease, disorder or other condition, including without limitation those disclosed herein.

[0176] In some embodiments, the phenotype comprises a disease or condition such as those listed in Tables 1 or 16. For example, the phenotype can comprise detecting the presence of or likelihood of developing a tumor, neoplasm, or cancer, or characterizing the tumor, neoplasm, or cancer (e.g., stage, grade, aggressiveness, likelihood of metastatis or recurrence, etc). Cancers that can be detected or assessed by methods or compositions described herein include, but are not limited to, breast cancer, ovarian cancer, lung cancer, colon cancer, hyperplastic polyp, adenoma, colorectal cancer, high grade dysplasia, low grade dysplasia, prostatic hyperplasia, prostate cancer, melanoma, pancreatic cancer, brain cancer (such as a glioblastoma), hematological malignancy, hepatocellular carcinoma, cervical cancer, endometrial cancer, head and neck cancer, esophageal cancer, gastrointestinal stromal tumor (GIST), renal cell carcinoma (RCC) or gastric cancer. The colorectal cancer can be CRC Dukes B or Dukes C-D. The hematological malignancy can be B-Cell Chronic Lymphocytic Leukemia, B-Cell Lymphoma-DLBCL, B-Cell Lymphoma-DLBCL-germinal center-like, B-Cell Lymphoma-DLBCL-activated B-cell-like, and Burkitt's lymphoma.

[0177] The phenotype can be a premalignant condition, such as actinic keratosis, atrophic gastritis, leukoplakia, erythroplasia, Lymphomatoid Granulomatosis, preleukemia, fibrosis, cervical dysplasia, uterine cervical dysplasia, xeroderma pigmentosum, Barrett's Esophagus, colorectal polyp, or other abnormal tissue growth or lesion that is likely to develop into a malignant tumor. Transformative viral infections such as HIV and HPV also present phenotypes that can be assessed according to the invention.

[0178] A cancer characterized by the methods of the invention can comprise, without limitation, a carcinoma, a sarcoma, a lymphoma or leukemia, a germ cell tumor, a blastoma, or other cancers. Carcinomas include without limitation epithelial neoplasms, squamous cell neoplasms squamous cell carcinoma, basal cell neoplasms basal cell carcinoma, transitional cell papillomas and carcinomas, adenomas and adenocarcinomas (glands), adenoma, adenocarcinoma, linitis plastica insulinoma, glucagonoma, gastrinoma, vipoma, cholangiocarcinoma, hepatocellular carcinoma, adenoid cystic carcinoma, carcinoid tumor of appendix, prolactinoma, oncocytoma, hurthle cell adenoma, renal cell carcinoma, grawitz tumor, multiple endocrine adenomas, endometrioid adenoma, adnexal and skin appendage neoplasms, mucoepidermoid neoplasms, cystic, mucinous and serous neoplasms, cystadenoma, pseudomyxoma peritonei, ductal, lobular and medullary neoplasms, acinar cell neoplasms, complex epithelial neoplasms, warthin's tumor, thymoma, specialized gonadal neoplasms, sex cord stromal tumor, thecoma, granulosa cell tumor, arrhenoblastoma, sertoli leydig cell tumor, glomus tumors, paraganglioma, pheochromocytoma, glomus tumor, nevi and melanomas, melanocytic nevus, malignant melanoma, melanoma, nodular melanoma, dysplastic nevus, lentigo maligna melanoma, superficial spreading melanoma, and malignant acral lentiginous melanoma. Sarcoma includes without limitation Askin's tumor, botryodies, chondrosarcoma, Ewing's sarcoma, malignant hemangio endothelioma, malignant schwannoma, osteosarcoma, soft tissue sarcomas including: alveolar soft part sarcoma, angiosarcoma, cystosarcoma phyllodes, dermatofibrosarcoma, desmoid tumor, desmoplastic small round cell tumor, epithelioid sarcoma, extraskeletal chondrosarcoma, extraskeletal osteosarcoma, fibrosarcoma, hemangiopericytoma, hemangiosarcoma, kaposi's sarcoma, leiomyosarcoma, liposarcoma, lymphangiosarcoma, lymphosarcoma, malignant fibrous histiocytoma, neurofibrosarcoma, rhabdomyosarcoma, and synovialsarcoma. Lymphoma and leukemia include without limitation chronic lymphocytic leukemia/small lymphocytic lymphoma, B-cell prolymphocytic leukemia, lymphoplasmacytic lymphoma (such as waldenstrom macroglobulinemia), splenic marginal zone lymphoma, plasma cell myeloma, plasmacytoma, monoclonal immunoglobulin deposition diseases, heavy chain diseases, extranodal marginal zone B cell lymphoma, also called malt lymphoma, nodal marginal zone B cell lymphoma (nmzl), follicular lymphoma, mantle cell lymphoma, diffuse large B cell lymphoma, mediastinal (thymic) large B cell lymphoma, intravascular large B cell lymphoma, primary effusion lymphoma, burkitt lymphoma/leukemia, T cell prolymphocytic leukemia, T cell large granular lymphocytic leukemia, aggressive NK cell leukemia, adult T cell leukemia/lymphoma, extranodal NK/T cell lymphoma, nasal type, enteropathy-type T cell lymphoma, hepatosplenic T cell lymphoma, blastic NK cell lymphoma, mycosis fungoides/sezary syndrome, primary cutaneous CD30-positive T cell lymphoproliferative disorders, primary cutaneous anaplastic large cell lymphoma, lymphomatoid papulosis, angioimmunoblastic T cell lymphoma, peripheral T cell lymphoma, unspecified, anaplastic large cell lymphoma, classical hodgkin lymphomas (nodular sclerosis, mixed cellularity, lymphocyte-rich, lymphocyte depleted or not depleted), and nodular lymphocyte-predominant hodgkin lymphoma. Germ cell tumors include without limitation germinoma, dysgerminoma, seminoma, nongerminomatous germ cell tumor, embryonal carcinoma, endodermal sinus turmor, choriocarcinoma, teratoma, polyembryoma, and gonadoblastoma. Blastoma includes without limitation nephroblastoma, medulloblastoma, and retinoblastoma. Other cancers include without limitation labial carcinoma, larynx carcinoma, hypopharynx carcinoma, tongue carcinoma, salivary gland carcinoma, gastric carcinoma, adenocarcinoma, thyroid cancer (medullary and papillary thyroid carcinoma), renal carcinoma, kidney parenchyma carcinoma, cervix carcinoma, uterine corpus carcinoma, endometrium carcinoma, chorion carcinoma, testis carcinoma, urinary carcinoma, melanoma, brain tumors such as glioblastoma, astrocytoma, meningioma, medulloblastoma and peripheral neuroectodermal tumors, gall bladder carcinoma, bronchial carcinoma, multiple myeloma, basalioma, teratoma, retinoblastoma, choroidea melanoma, seminoma, rhabdomyosarcoma, craniopharyngeoma, osteosarcoma, chondrosarcoma, myosarcoma, liposarcoma, fibrosarcoma, Ewing sarcoma, and plasmocytoma.

[0179] In a further embodiment, the cancer under analysis may be a lung cancer including non-small cell lung cancer and small cell lung cancer (including small cell carcinoma (oat cell cancer), mixed small cell/large cell carcinoma, and combined small cell carcinoma), colon cancer, breast cancer, prostate cancer, liver cancer, pancreas cancer, brain cancer, kidney cancer, ovarian cancer, stomach cancer, skin cancer, bone cancer, gastric cancer, breast cancer, pancreatic cancer, glioma, glioblastoma, hepatocellular carcinoma, papillary renal carcinoma, head and neck squamous cell carcinoma, leukemia, lymphoma, myeloma, or a solid tumor.

[0180] In embodiments, the cancer comprises an acute lymphoblastic leukemia; acute myeloid leukemia; adrenocortical carcinoma; AIDS-related cancers; AIDS-related lymphoma; anal cancer; appendix cancer; astrocytomas; atypical teratoid/rhabdoid tumor; basal cell carcinoma; bladder cancer; brain stem glioma; brain tumor (including brain stem glioma, central nervous system atypical teratoid/rhabdoid tumor, central nervous system embryonal tumors, astrocytomas, craniopharyngioma, ependymoblastoma, ependymoma, medulloblastoma, medulloepithelioma, pineal parenchymal tumors of intermediate differentiation, supratentorial primitive neuroectodermal tumors and pineoblastoma); breast cancer; bronchial tumors; Burkitt lymphoma; cancer of unknown primary site; carcinoid tumor; carcinoma of unknown primary site; central nervous system atypical teratoid/rhabdoid tumor; central nervous system embryonal tumors; cervical cancer; childhood cancers; chordoma; chronic lymphocytic leukemia; chronic myelogenous leukemia; chronic myeloproliferative disorders; colon cancer; colorectal cancer; craniopharyngioma; cutaneous T-cell lymphoma; endocrine pancreas islet cell tumors; endometrial cancer; ependymoblastoma; ependymoma; esophageal cancer; esthesioneuroblastoma; Ewing sarcoma; extracranial germ cell tumor; extragonadal germ cell tumor; extrahepatic bile duct cancer; gallbladder cancer; gastric (stomach) cancer; gastrointestinal carcinoid tumor; gastrointestinal stromal cell tumor; gastrointestinal stromal tumor (GIST); gestational trophoblastic tumor; glioma; hairy cell leukemia; head and neck cancer; heart cancer; Hodgkin lymphoma; hypopharyngeal cancer; intraocular melanoma; islet cell tumors; Kaposi sarcoma; kidney cancer; Langerhans cell histiocytosis; laryngeal cancer; lip cancer; liver cancer; malignant fibrous histiocytoma bone cancer; medulloblastoma; medulloepithelioma; melanoma; Merkel cell carcinoma; Merkel cell skin carcinoma; mesothelioma; metastatic squamous neck cancer with occult primary; mouth cancer; multiple endocrine neoplasia syndromes; multiple myeloma; multiple myeloma/plasma cell neoplasm; mycosis fungoides; myelodysplastic syndromes; myeloproliferative neoplasms; nasal cavity cancer; nasopharyngeal cancer; neuroblastoma; Non-Hodgkin lymphoma; nonmelanoma skin cancer; non-small cell lung cancer; oral cancer; oral cavity cancer; oropharyngeal cancer; osteosarcoma; other brain and spinal cord tumors; ovarian cancer; ovarian epithelial cancer; ovarian germ cell tumor; ovarian low malignant potential tumor; pancreatic cancer; papillomatosis; paranasal sinus cancer; parathyroid cancer; pelvic cancer; penile cancer; pharyngeal cancer; pineal parenchymal tumors of intermediate differentiation; pineoblastoma; pituitary tumor; plasma cell neoplasm/multiple myeloma; pleuropulmonary blastoma; primary central nervous system (CNS) lymphoma; primary hepatocellular liver cancer; prostate cancer; rectal cancer; renal cancer; renal cell (kidney) cancer; renal cell cancer; respiratory tract cancer; retinoblastoma; rhabdomyosarcoma; salivary gland cancer; Sézary syndrome; small cell lung cancer; small intestine cancer; soft tissue sarcoma; squamous cell carcinoma; squamous neck cancer; stomach (gastric) cancer; supratentorial primitive neuroectodermal tumors; T-cell lymphoma; testicular cancer; throat cancer; thymic carcinoma; thymoma; thyroid cancer; transitional cell cancer; transitional cell cancer of the renal pelvis and ureter; trophoblastic tumor; ureter cancer; urethral cancer; uterine cancer; uterine sarcoma; vaginal cancer; vulvar cancer; Waldenström macroglobulinemia; or Wilm's tumor. The methods of the invention can be used to characterize these and other cancers. Thus, characterizing a phenotype can be providing a diagnosis, prognosis or theranosis of one of the cancers disclosed herein.

[0181] In some embodiments, the cancer comprises an acute myeloid leukemia (AML), breast carcinoma, cholangiocarcinoma, colorectal adenocarcinoma, extrahepatic bile duct adenocarcinoma, female genital tract malignancy, gastric adenocarcinoma, gastroesophageal adenocarcinoma, gastrointestinal stromal tumors (GIST), glioblastoma, head and neck squamous carcinoma, leukemia, liver hepatocellular carcinoma, low grade glioma, lung bronchioloalveolar carcinoma (BAC), lung non-small cell lung cancer (NSCLC), lung small cell cancer (SCLC), lymphoma, male genital tract malignancy, malignant solitary fibrous tumor of the pleura (MSFT), melanoma, multiple myeloma, neuroendocrine tumor, nodal diffuse large B-cell lymphoma, non epithelial ovarian cancer (non-EOC), ovarian surface epithelial carcinoma, pancreatic adenocarcinoma, pituitary carcinomas, oligodendroglioma, prostatic adenocarcinoma, retroperitoneal or peritoneal carcinoma, retroperitoneal or peritoneal sarcoma, small intestinal malignancy, soft tissue tumor, thymic carcinoma, thyroid carcinoma, or uveal melanoma. The methods of the invention can be used to characterize these and other cancers. Thus, characterizing a phenotype can be providing a diagnosis, prognosis or theranosis of one of the cancers disclosed herein.

[0182] The phenotype can also be an inflammatory disease, immune disease, or autoimmune disease. For example, the disease may be inflammatory bowel disease (IBD), Crohn's disease (CD), ulcerative colitis (UC), pelvic inflammation, vasculitis, psoriasis, diabetes, autoimmune hepatitis, Multiple Sclerosis, Myasthenia Gravis, Type I diabetes, Rheumatoid Arthritis, Psoriasis, Systemic Lupus Erythematosis (SLE), Hashimoto's Thyroiditis, Grave's disease, Ankylosing Spondylitis Sjogrens Disease, CREST syndrome, Scleroderma, Rheumatic Disease, organ rejection, Primary Sclerosing Cholangitis, or sepsis.

[0183] The phenotype can also comprise a cardiovascular disease, such as atherosclerosis, congestive heart failure, vulnerable plaque, stroke, or ischemia. The cardiovascular disease or condition can be high blood pressure, stenosis, vessel occlusion or a thrombotic event.

[0184] The phenotype can also comprise a neurological disease, such as Multiple Sclerosis (MS), Parkinson's Disease (PD), Alzheimer's Disease (AD), schizophrenia, bipolar disorder, depression, autism, Prion Disease, Pick's disease, dementia, Huntington disease (HD), Down's syndrome, cerebrovascular disease, Rasmussen's encephalitis, viral meningitis, neurospsychiatric systemic lupus erythematosus (NPSLE), amyotrophic lateral sclerosis, Creutzfeldt-Jacob disease, Gerstmann-Straussler-Scheinker disease, transmissible spongiform encephalopathy, ischemic reperfusion damage (e.g. stroke), brain trauma, microbial infection, or chronic fatigue syndrome. The phenotype may also be a condition such as fibromyalgia, chronic neuropathic pain, or peripheral neuropathic pain.

[0185] The phenotype may also comprise an infectious disease, such as a bacterial, viral or yeast infection. For example, the disease or condition may be Whipple's Disease, Prion Disease, cirrhosis, methicillin-resistant staphylococcus aureus, HIV, hepatitis, syphilis, meningitis, malaria, tuberculosis, or influenza. Viral proteins, such as HIV or HCV-like particles can be assessed in a vesicle, to characterize a viral condition.

[0186] The phenotype can also comprise a perinatal or pregnancy related condition (e.g. preeclampsia or preterm birth), metabolic disease or condition, such as a metabolic disease or condition associated with iron metabolism. For example, hepcidin can be assayed in a vesicle to characterize an iron deficiency. The metabolic disease or condition can also be diabetes, inflammation, or a perinatal condition.

[0187] The compositions and methods of the invention can be used to characterize these and other diseases and disorders that can be assessed via biomarkers. Thus, characterizing a phenotype can be providing a diagnosis, prognosis or theranosis of one of the diseases and disorders disclosed herein.

### Subject

[0188] One or more phenotypes of a subject can be determined by analyzing one or more vesicles, such as vesicles, in a biological sample obtained from the subject. A subject or patient can include, but is not limited to, mammals such as bovine, avian, canine, equine, feline, ovine, porcine, or primate animals (including humans and non-human primates). A subject can also include a mammal of importance due to being endangered, such as a Siberian tiger; or economic importance, such as an animal raised on a farm for consumption by humans, or an animal of social importance to humans, such as an animal kept as a pet or in a zoo. Examples of such animals include, but are not limited to, carnivores such as cats and dogs; swine including pigs, hogs and wild boars; ruminants or ungulates such as cattle, oxen, sheep, giraffes, deer, goats, bison, camels or horses. Also included are birds that are endangered or kept in zoos, as well as fowl and more particularly domesticated fowl, i.e. poultry, such as turkeys and chickens, ducks, geese, guinea fowl. Also included are domesticated swine and horses (including race horses). In addition, any animal species connected to commercial activities are also included such as those animals connected to agriculture and aquaculture and other activities in which disease monitoring, diagnosis, and therapy selection are routine practice in husbandry for economic productivity and/or safety of the food chain.

[0189] The subject can have a pre-existing disease or condition, such as cancer. Alternatively, the subject may not have any known pre-existing condition. The subject may also be non-responsive to an existing or past treatment, such as a treatment for cancer.

### Samples

[0190] A sample used and/or assessed via the compositions and methods of the invention includes any relevant biological sample that can be used for biomarker assessment, including without limitation sections of tissues such as biopsy or tissue removed during surgical or other procedures, bodily fluids, autopsy samples, frozen sections taken for histological purposes, and cell cultures. Such samples include blood and blood fractions or products (e.g., serum, buffy coat, plasma, platelets, red blood cells, and the like), sputum, malignant effusion, cheek cells tissue, cultured cells (e.g., primary cultures, explants, and transformed cells), stool, urine, other biological or bodily fluids (e.g., prostatic fluid, gastric fluid, intestinal fluid, renal fluid, lung fluid, cerebrospinal fluid, and the like), etc. The sample can comprise biological material that is a fresh frozen & formalin fixed paraffin embedded (FFPE) block, formalin-fixed paraffin embedded, or is within an RNA preservative+formalin fixative. More than one sample of more than one type can be used for each patient.

[0191] The sample used in the methods described herein can be a formalin fixed paraffin embedded (FFPE) sample. The FFPE sample can be one or more of fixed tissue, unstained slides, bone marrow core or clot, core needle biopsy, malignant fluids and fine needle aspirate (FNA). In an embodiment, the fixed tissue comprises a tumor containing formalin fixed paraffin embedded (FFPE) block from a surgery or biopsy. In another embodiment, the unstained slides comprise unstained, charged, unbaked slides from a paraffin block. In another embodiment, bone marrow core or clot comprises a decalcified core. A formalin fixed core and/or clot can be paraffin-embedded. In still another embodiment, the core needle biopsy comprises 1, 2, 3, 4, 5, 6, 7, 8, 9, 10 or more, e.g., 3-4, paraffin embedded biopsy samples. An 18 gauge needle biopsy can be used. The malignant fluid can comprise a sufficient volume of fresh pleural/ascitic fluid to produce a 5×5×2 mm cell pellet. The fluid can be formalin fixed in a paraffin block. In an embodiment, the core needle biopsy comprises 1, 2, 3, 4, 5, 6, 7, 8, 9, 10 or more, e.g., 4-6, paraffin embedded aspirates.

[0192] A sample may be processed according to techniques understood by those in the art. A sample can be without limitation fresh, frozen or fixed cells or tissue. In some embodiments, a sample comprises formalin-fixed paraffin-embedded (FFPE) tissue, fresh tissue or fresh frozen (FF) tissue. A sample can comprise cultured cells, including primary or immortalized cell lines derived from a subject sample. A sample can also refer to an extract from a sample from a subject. For example, a sample can comprise DNA, RNA or protein extracted from a tissue or a bodily fluid. Many techniques and commercial kits are available for such purposes. The fresh sample from the individual can be treated with an agent to preserve RNA prior to further processing, e.g., cell lysis and extraction. Samples can include frozen samples collected for other purposes. Samples can be associated with relevant information such as age, gender, and clinical symptoms present in the subject; source of the sample; and methods of collection and storage of the sample. A sample is typically obtained from a subject.

[0193] A biopsy comprises the process of removing a tissue sample for diagnostic or prognostic evaluation, and to the tissue specimen itself. Any biopsy technique known in the art can be applied to the molecular profiling methods of the present invention. The biopsy technique applied can depend on the tissue type to be evaluated (e.g., colon, prostate, kidney, bladder, lymph node, liver, bone marrow, blood cell, lung, breast, etc.), the size and type of the tumor (e.g., solid or suspended, blood or ascites), among other factors. Representative biopsy techniques include, but are not limited to, excisional biopsy, incisional biopsy, needle biopsy, surgical biopsy, and bone marrow biopsy. An “excisional biopsy” refers to the removal of an entire tumor mass with a small margin of normal tissue surrounding it. An “incisional biopsy” refers to the removal of a wedge of tissue that includes a cross-sectional diameter of the tumor. Molecular profiling can use a “core-needle biopsy” of the tumor mass, or a “fine-needle aspiration biopsy” which generally obtains a suspension of cells from within the tumor mass. Biopsy techniques are discussed, for example, in Harrison's Principles of Internal Medicine, Kasper, et al., eds., 16th ed., 2005, Chapter 70, and throughout Part V.

[0194] Standard molecular biology techniques known in the art and not specifically described are generally followed as in Sambrook et al., Molecular Cloning: A Laboratory Manual, Cold Spring Harbor Laboratory Press, New York (1989), and as in Ausubel et al., Current Protocols in Molecular Biology, John Wiley and Sons, Baltimore, Md. (1989) and as in Perbal, A Practical Guide to Molecular Cloning, John Wiley & Sons, New York (1988), and as in Watson et al., Recombinant DNA, Scientific American Books, New York and in Birren et al (eds) Genome Analysis: A Laboratory Manual Series, Vols. 1-4 Cold Spring Harbor Laboratory Press, New York (1998) and methodology as set forth in U.S. Pat. Nos. 4,666,828; 4,683,202; 4,801,531; 5,192,659 and 5,272,057 and incorporated herein by reference. Polymerase chain reaction (PCR) can be carried out generally as in PCR Protocols: A Guide to Methods and Applications, Academic Press, San Diego, Calif. (1990).

[0195] The biological sample assessed using the compositions and methods of the invention can be any useful bodily or biological fluid, including but not limited to peripheral blood, sera, plasma, ascites, urine, cerebrospinal fluid (CSF), sputum, saliva, bone marrow, synovial fluid, aqueous humor, amniotic fluid, cerumen, breast milk, broncheoalveolar lavage fluid, semen (including prostatic fluid), Cowper's fluid or pre-ejaculatory fluid, female ejaculate, sweat, fecal matter, hair, tears, cyst fluid, pleural and peritoneal fluid, pericardial fluid, lymph, chyme, chyle, bile, interstitial fluid, menses, pus, sebum, vomit, vaginal secretions, mucosal secretion, stool water, pancreatic juice, lavage fluids from sinus cavities, bronchopulmonary aspirates or other lavage fluids, cells, cell culture, or a cell culture supernatant. A biological sample may also include the blastocyl cavity, umbilical cord blood, or maternal circulation which may be of fetal or maternal origin. The biological sample may also be a cell culture, tissue sample or biopsy from which vesicles and other circulating biomarkers may be obtained. For example, cells of interest can be cultured and vesicles isolated from the culture. In various embodiments, biomarkers or more particularly biosignatures disclosed herein can be assessed directly from such biological samples (e.g., identification of presence or levels of nucleic acid or polypeptide biomarkers or functional fragments thereof) using various methods, such as extraction of nucleic acid molecules from blood, plasma, serum or any of the foregoing biological samples, use of protein or antibody arrays to identify polypeptide (or functional fragment) biomarker(s), as well as other array, sequencing, PCR and proteomic techniques known in the art for identification and assessment of nucleic acid and polypeptide molecules. In addition, one or more components present in such samples can be first isolated or enriched and further processed to assess the presence or levels of selected biomarkers, to assess a given biosignature (e.g., isolated microvesicles prior to profiling for protein and/or nucleic acid biomarkers).

[0196] Table 1 presents a non-limiting listing of diseases, conditions, or biological states and corresponding biological samples that may be used for analysis according to the methods of the invention.

TABLE 1
Examples of Biological Samples for Various Diseases, Conditions, or Biological States

| Illustrative Disease, Condition or Biological | |
|---|---|
| State | Illustrative Biological Samples |
| Cancers/neoplasms affecting the following tissue | Tumor, blood, serum, plasma, cerebrospinal fluid |
| types/bodily systems: breast, lung, ovarian, colon, | (CSF), urine, sputum, ascites, synovial fluid, |
| rectal, prostate, pancreatic, brain, bone, connective | semen, nipple aspirates, saliva, bronchoalveolar |
| tissue, glands, skin, lymph, nervous system, | lavage fluid, tears, oropharyngeal washes, feces, |
| endocrine, germ cell, genitourinary, | peritoneal fluids, pleural effusion, sweat, tears, |
| hematologic/blood, bone marrow, muscle, eye, | aqueous humor, pericardial fluid, lymph, chyme, |
| esophageal, fat tissue, thyroid, pituitary, spinal | chyle, bile, stool water, amniotic fluid, breast milk, |
| cord, bile duct, heart, gall bladder, bladder, testes, | pancreatic juice, cerumen, Cowper's fluid or pre- |
| cervical, endometrial, renal, ovarian, | ejaculatory fluid, female ejaculate, interstitial fluid, |
| digestive/gastrointestinal, stomach, head and neck, | menses, mucus, pus, sebum, vaginal lubrication, |
| liver, leukemia, respiratory/thorasic, cancers of | vomit |
| unknown primary (CUP) | |
| Neurodegenerative/neurological disorders: | Blood, serum, plasma, CSF, urine |
| Parkinson's disease, Alzheimer's Disease and | |
| multiple sclerosis, Schizophrenia, and bipolar | |
| disorder, spasticity disorders, epilepsy | |
| Cardiovascular Disease: atherosclerosis, | Blood, serum, plasma, CSF, urine |
| cardiomyopathy, endocarditis, vunerable plaques, | |
| infection | |
| Stroke: ischemic, intracerebral hemorrhage, | Blood, serum, plasma, CSF, urine |
| subarachnoid hemorrhage, transient ischemic | |
| attacks (TIA) | |
| Pain disorders: peripheral neuropathic pain and | Blood, serum, plasma, CSF, urine |
| chronic neuropathic pain, and fibromyalgia, | |
| Autoimmune disease: systemic and localized | Blood, serum, plasma, CSF, urine, synovial fluid |
| diseases, rheumatic disease, Lupus, Sjogren's | |
| syndrome | |
| Digestive system abnormalities: Barrett's | Blood, serum, plasma, CSF, urine |
| esophagus, irritable bowel syndrome, ulcerative | |
| colitis, Crohn's disease, Diverticulosis and | |
| Diverticulitis, Celiac Disease | |
| Endocrine disorders: diabetes mellitus, various | Blood, serum, plasma, CSF, urine |
| forms of Thyroiditis, adrenal disorders, pituitary | |
| disorders | |
| Diseases and disorders of the skin: psoriasis | Blood, serum, plasma, CSF, urine, synovial fluid, |
| | tears |
| Urological disorders: benign prostatic hypertrophy | Blood, serum, plasma, urine |
| (BPH), polycystic kidney disease, interstitial | |
| cystitis | |
| Hepatic disease/injury: Cirrhosis, induced | Blood, serum, plasma, urine |
| hepatotoxicity (due to exposure to natural or | |
| synthetic chemical sources) | |
| Kidney disease/injury: acute, sub-acute, chronic | Blood, serum, plasma, urine |
| conditions, Podocyte injury, focal segmental | |
| glomerulosclerosis | |
| Endometriosis | Blood, serum, plasma, urine, vaginal fluids |
| Osteoporosis | Blood, serum, plasma, urine, synovial fluid |
| Pancreatitis | Blood, serum, plasma, urine, pancreatic juice |
| Asthma | Blood, serum, plasma, urine, sputum, bronchiolar |
| | lavage fluid |
| Allergies | Blood, serum, plasma, urine, sputum, bronchiolar |
| | lavage fluid |
| Prion-related diseases | Blood, serum, plasma, CSF, urine |
| Viral Infections: HIV/AIDS | Blood, serum, plasma, urine |
| Sepsis | Blood, serum, plasma, urine, tears, nasal lavage |
| Organ rejection/transplantation | Blood, serum, plasma, urine, various lavage fluids |
| Differentiating conditions: adenoma versus | Blood, serum, plasma, urine, sputum, feces, colonic |
| hyperplastic polyp, irritable bowel syndrome (IBS) | lavage fluid |
| versus normal, classifying Dukes stages A, B, C, | |
| and/or D of colon cancer, adenoma with low-grade | |
| hyperplasia versus high-grade hyperplasia, | |
| adenoma versus normal, colorectal cancer versus | |
| normal, IBS versus. ulcerative colitis (UC) versus | |
| Crohn's disease (CD), | |
| Pregnancy related physiological states, conditions, | Maternal serum, plasma, amniotic fluid, cord blood |
| or affiliated diseases: genetic risk, adverse | |
| pregnancy outcomes | |

[0197] The methods of the invention can be used to characterize a phenotype using a blood sample or blood derivative. Blood derivatives include plasma and serum. Blood plasma is the liquid component of whole blood, and makes up approximately 55% of the total blood volume. It is composed primarily of water with small amounts of minerals, salts, ions, nutrients, and proteins in solution. In whole blood, red blood cells, leukocytes, and platelets are suspended within the plasma. Blood serum refers to blood plasma without fibrinogen or other clotting factors (i.e., whole blood minus both the cells and the clotting factors).

[0198] The biological sample may be obtained through a third party, such as a party not performing the analysis of the biomarkers, whether direct assessment of a biological sample or by profiling one or more vesicles obtained from the biological sample. For example, the sample may be obtained through a clinician, physician, or other health care manager of a subject from which the sample is derived. Alternatively, the biological sample may obtained by the same party analyzing the vesicle. In addition, biological samples be assayed, are archived (e.g., frozen) or ortherwise stored in under preservative conditions.

[0199] Furthermore, a biological sample can comprise a vesicle or cell membrane fragment that is derived from a cell of origin and available extracellularly in a subject's biological fluid or extracellular milieu.

[0200] Methods of the invention can include assessing one or more vesicles, including assessing vesicle populations. A vesicle, as used herein, is a membrane vesicle that is shed from cells. Vesicles or membrane vesicles include without limitation: circulating microvesicles (cMVs), microvesicle, exosome, nanovesicle, dexosome, bleb, blebby, prostasome, microparticle, intralumenal vesicle, membrane fragment, intralumenal endosomal vesicle, endosomal-like vesicle, exocytosis vehicle, endosome vesicle, endosomal vesicle, apoptotic body, multivesicular body, secretory vesicle, phospholipid vesicle, liposomal vesicle, argosome, texasome, secresome, tolerosome, melanosome, oncosome, or exocytosed vehicle. Furthermore, although vesicles may be produced by different cellular processes, the methods of the invention are not limited to or reliant on any one mechanism, insofar as such vesicles are present in a biological sample and are capable of being characterized by the methods disclosed herein. Unless otherwise specified, methods that make use of a species of vesicle can be applied to other types of vesicles. Vesicles comprise spherical structures with a lipid bilayer similar to cell membranes which surrounds an inner compartment which can contain soluble components, sometimes referred to as the payload. In some embodiments, the methods of the invention make use of exosomes, which are small secreted vesicles of about 40-100 nm in diameter. For a review of membrane vesicles, including types and characterizations, see Thery et al., Nat Rev Immunol. 2009 August; 9(8):581-93. Some properties of different types of vesicles include those in Table 2:

TABLE 2
Vesicle Properties

| | | | | | | | Membrane | | Exosome- | | Apoptotic | |
|---|---|---|---|---|---|---|---|---|---|---|---|---|
| Feature | Exosomes | | Microvesicles | | Ectosomes | | particles | | like vesicles | | vesicles | |
| Size | 50-100 | nm | 100-1,000 | nm | 50-200 | nm | 50-80 | nm | 20-50 | nm | 50-500 | nm |
| Density in | 1.13-1.19 | g/ml | | | | | 1.04-1.07 | g/ml | 1.1 | g/ml | 1.16-1.28 | g/ml |
| sucrose | | | | | | | | | | | | |

| EM | Cup shape | | Irregular | | Bilamellar | | Round | | Irregular | | Heterogeneous |
|---|---|---|---|---|---|---|---|---|---|---|---|
| appearance | | | shape, | | round | | | | shape | | |
| | | | electron | | structures | | | | | | |
| | | | dense | | | | | | | | |
| Sedimentation | 100,000 | g | 10,000 | g | 160,000-200,000 | g | 100,000-200,000 | g | 175,000 | g | 1,200 g, |
| | | | | | | | | | | | 10,000 g, |
| | | | | | | | | | | | 100,000 g |

| | | | | |
|---|---|---|---|---|
| Lipid | Enriched in | Expose PPS | Enriched in | No lipid |
| composition | cholesterol, | | cholesterol and | rafts |
| | sphingomyelin | | diacylglycerol; | |
| | and ceramide; | | expose PPS | |
| | contains lipid | | | |
| | rafts; expose | | | |
| | PPS | | | |

| Major protein | Tetraspanins | Integrins, | CR1 and | CD133; no | TNFRI | Histones |
|---|---|---|---|---|---|---|
| markers | (e.g., CD63, | selectins and | proteolytic | CD63 | | |
| | CD9), Alix, | CD40 ligand | enzymes; no | | | |
| | TSG101 | | CD63 | | | |
| Intracellular | Internal | Plasma | Plasma | Plasma | | |
| origin | compartments | membrane | membrane | membrane | | |
| | (endosomes) | | | | | |

Abbreviations:
phosphatidylserine (PPS);
electron microscopy (EM)

[0201] Vesicles include shed membrane bound particles, or “microparticles,” that are derived from either the plasma membrane or an internal membrane. Vesicles can be released into the extracellular environment from cells. Cells releasing vesicles include without limitation cells that originate from, or are derived from, the ectoderm, endoderm, or mesoderm. The cells may have undergone genetic, environmental, and/or any other variations or alterations. For example, the cell can be tumor cells. A vesicle can reflect any changes in the source cell, and thereby reflect changes in the originating cells, e.g., cells having various genetic mutations. In one mechanism, a vesicle is generated intracellularly when a segment of the cell membrane spontaneously invaginates and is ultimately exocytosed (see for example, Keller et al., Immunol. Lett. 107 (2): 102-8 (2006)). Vesicles also include cell-derived structures bounded by a lipid bilayer membrane arising from both herniated evagination (blebbing) separation and sealing of portions of the plasma membrane or from the export of any intracellular membrane-bounded vesicular structure containing various membrane-associated proteins of tumor origin, including surface-bound molecules derived from the host circulation that bind selectively to the tumor-derived proteins together with molecules contained in the vesicle lumen, including but not limited to tumor-derived microRNAs or intracellular proteins. Blebs and blebbing are further described in Charras et al., Nature Reviews Molecular and Cell Biology, Vol. 9, No. 11, p. 730-736 (2008). A vesicle shed into circulation or bodily fluids from tumor cells may be referred to as a “circulating tumor-derived vesicle.” When such vesicle is an exosome, it may be referred to as a circulating-tumor derived exosome (CTE). In some instances, a vesicle can be derived from a specific cell of origin. CTE, as with a cell-of-origin specific vesicle, typically have one or more unique biomarkers that permit isolation of the CTE or cell-of-origin specific vesicle, e.g., from a bodily fluid and sometimes in a specific manner. For example, a cell or tissue specific markers are used to identify the cell of origin. Examples of such cell or tissue specific markers are disclosed herein and can further be accessed in the Tissue-specific Gene Expression and Regulation (TiGER) Database, available at bioinfo.wilmer.jhu.edu/tiger/; Liu et al. (2008) TiGER: a database for tissue-specific gene expression and regulation. BMC Bioinformatics. 9:271; TissueDistributionDBs, available at genome.dkfz-heidelberg.de/menu/tissue_db/index.html.

[0202] A vesicle can have a diameter of greater than about 10 nm, 20 nm, or 30 nm. A vesicle can have a diameter of greater than 40 nm, 50 nm, 100 nm, 200 nm, 500 nm, 1000 nm, 1500 nm, 2000 nm or greater than 10,000 nm. A vesicle can have a diameter of about 20-2000 nm, about 20-1500 nm, about 30-1000 nm, about 30-800 nm, about 30-200 nm, or about 30-100 nm. In some embodiments, the vesicle has a diameter of less than 10,000 nm, 2000 nm, 1500 nm, 1000 nm, 800 nm, 500 nm, 200 nm, 100 nm, 50 nm, 40 nm, 30 nm, 20 nm or less than 10 nm. As used herein the term “about” in reference to a numerical value means that variations of 10% above or below the numerical value are within the range ascribed to the specified value. Typical sizes for various types of vesicles are shown in Table 2. Vesicles can be assessed to measure the diameter of a single vesicle or any number of vesicles. For example, the range of diameters of a vesicle population or an average diameter of a vesicle population can be determined. Vesicle diameter can be assessed using methods known in the art, e.g., imaging technologies such as electron microscopy. In an embodiment, a diameter of one or more vesicles is determined using optical particle detection. See, e.g., U.S. Pat. No. 7,751,053, entitled “Optical Detection and Analysis of Particles” and issued Jul. 6, 2010; and U.S. Pat. No. 7,399,600, entitled “Optical Detection and Analysis of Particles” and issued Jul. 15, 2010.

[0203] In some embodiments, the methods of the invention comprise assessing vesicles directly such as in a biological sample without prior isolation, purification, or concentration from the biological sample. For example, the amount of vesicles in the sample can by itself provide a biosignature that provides a diagnostic, prognostic or theranostic determination. Alternatively, the vesicle in the sample may be isolated, captured, purified, or concentrated from a sample prior to analysis. As noted, isolation, capture or purification as used herein comprises partial isolation, partial capture or partial purification apart from other components in the sample. Vesicle isolation can be performed using various techniques as described herein, e.g., chromatography, filtration, centrifugation, flow cytometry, affinity capture (e.g., to a planar surface or bead), and/or using microfluidics. FIGS. 19B-19C present an overview of a method of the invention for assessing microvesicles using an aptamer pool.

[0204] Vesicles such as exosomes can be assessed to provide a phenotypic characterization by comparing vesicle characteristics to a reference. In some embodiments, surface antigens on a vesicle are assessed. The surface antigens can provide an indication of the anatomical origin and/or cellular of the vesicles and other phenotypic information, e.g., tumor status. For example, wherein vesicles found in a patient sample, e.g., a bodily fluid such as blood, serum or plasma, are assessed for surface antigens indicative of colorectal origin and the presence of cancer. The surface antigens may comprise any informative biological entity that can be detected on the vesicle membrane surface, including without limitation surface proteins, lipids, carbohydrates, and other membrane components. For example, positive detection of colon derived vesicles expressing tumor antigens can indicate that the patient has colorectal cancer. As such, methods of the invention can be used to characterize any disease or condition associated with an anatomical or cellular origin, by assessing, for example, disease-specific and cell-specific biomarkers of one or more vesicles obtained from a subject.

[0205] In another embodiment, the methods of the invention comprise assessing one or more vesicle payload to provide a phenotypic characterization. The payload with a vesicle comprises any informative biological entity that can be detected as encapsulated within the vesicle, including without limitation proteins and nucleic acids, e.g., genomic or cDNA, mRNA, or functional fragments thereof, as well as microRNAs (miRs). In addition, methods of the invention are directed to detecting vesicle surface antigens (in addition or exclusive to vesicle payload) to provide a phenotypic characterization. For example, vesicles can be characterized by using binding agents (e.g., antibodies or aptamers) that are specific to vesicle surface antigens, and the bound vesicles can be further assessed to identify one or more payload components disclosed therein. As described herein, the levels of vesicles with surface antigens of interest or with payload of interest can be compared to a reference to characterize a phenotype. For example, overexpression in a sample of cancer-related surface antigens or vesicle payload, e.g., a tumor associated mRNA or microRNA, as compared to a reference, can indicate the presence of cancer in the sample. The biomarkers assessed can be present or absent, increased or reduced based on the selection of the desired target sample and comparison of the target sample to the desired reference sample. Non-limiting examples of target samples include: disease; treated/not-treated; different time points, such as a in a longitudinal study; and non-limiting examples of reference sample: non-disease; normal; different time points; and sensitive or resistant to candidate treatment(s).

### Microvesicle Isolation and Analysis

[0206] Sample Processing

[0207] A vesicle or a population of vesicles may be isolated, purified, concentrated or otherwise enriched prior to and/or during analysis. Unless otherwise specified, the terms “purified,” “isolated,” or similar as used herein in reference to vesicles or biomarker components are intended to include partial or complete purification or isolation of such components from a cell or organism. Analysis of a vesicle can include quantitiating the amount one or more vesicle populations of a biological sample. For example, a heterogeneous population of vesicles can be quantitated, or a homogeneous population of vesicles, such as a population of vesicles with a particular biomarker profile, a particular biosignature, or derived from a particular cell type can be isolated from a heterogeneous population of vesicles and quantitated. Analysis of a vesicle can also include detecting, quantitatively or qualitatively, one or more particular biomarker profile or biosignature of a vesicle, as described herein.

[0208] A vesicle can be stored and archived, such as in a bio-fluid bank and retrieved for analysis as desired. A vesicle may also be isolated from a biological sample that has been previously harvested and stored from a living or deceased subject. In addition, a vesicle may be isolated from a biological sample which has been collected as described in King et al., Breast Cancer Res 7(5): 198-204 (2005). A vesicle can be isolated from an archived or stored sample. Alternatively, a vesicle may be isolated from a biological sample and analyzed without storing or archiving of the sample. Furthermore, a third party may obtain or store the biological sample, or obtain or store the vesicle for analysis.

[0209] An enriched population of vesicles can be obtained from a biological sample. For example, vesicles may be concentrated or isolated from a biological sample using size exclusion chromatography, density gradient centrifugation, differential centrifugation, nanomembrane ultrafiltration, immunoabsorbent capture, affinity purification, microfluidic separation, or combinations thereof.

[0210] Size exclusion chromatography, such as gel permeation columns, centrifugation or density gradient centrifugation, and filtration methods can be used. For example, a vesicle can be isolated by differential centrifugation, anion exchange and/or gel permeation chromatography (for example, as described in U.S. Pat. Nos. 6,899,863 and 6,812,023), sucrose density gradients, organelle electrophoresis (for example, as described in U.S. Pat. No. 7,198,923), magnetic activated cell sorting (MACS), or with a nanomembrane ultrafiltration concentrator. Various combinations of isolation or concentration methods can be used.

[0211] Highly abundant proteins, such as albumin and immunoglobulin in blood samples, may hinder isolation of vesicles from a biological sample. For example, a vesicle can be isolated from a biological sample using a system that uses multiple antibodies that are specific to the most abundant proteins found in a biological sample, such as blood. Such a system can remove up to several proteins at once, thus unveiling the lower abundance species such as cell-of-origin specific vesicles. This type of system can be used for isolation of vesicles from biological samples such as blood, cerebrospinal fluid or urine. The isolation of vesicles from a biological sample may also be enhanced by high abundant protein removal methods as described in Chromy et al. J Proteome Res 2004; 3:1120-1127. In another embodiment, the isolation of vesicles from a biological sample may also be enhanced by removing serum proteins using glycopeptide capture as described in Zhang et al, Mol Cell Proteomics 2005;4:144-155. In addition, vesicles from a biological sample such as urine may be isolated by differential centrifugation followed by contact with antibodies directed to cytoplasmic or anti-cytoplasmic epitopes as described in Pisitkun et al., Proc Natl Acad Sci USA, 2004; 101:13368-13373.

[0212] Plasma contains a large variety of proteins including albumin, immunoglobulins, and clotting proteins such as fibrinogen. About 60% of plasma protein comprises the protein albumin (e.g., human serum albumin or HSA), which contributes to osmotic pressure of plasma to assist in the transport of lipids and steroid hormones. Globulins make up about 35% of plasma proteins and are used in the transport of ions, hormones and lipids assisting in immune function. About 4% of plasma protein comprises fibrinogen which is essential in the clotting of blood and can be converted into the insoluble protein fibrin. Other types of blood proteins include: Prealbumin, Alpha 1 antitrypsin, Alpha 1 acid glycoprotein, Alpha 1 fetoprotein, Haptoglobin, Alpha 2 macroglobulin, Ceruloplasmin, Transferrin, complement proteins C3 and C4, Beta 2 microglobulin, Beta lipoprotein, Gamma globulin proteins, C-reactive protein (CRP), Lipoproteins (chylomicrons, VLDL, LDL, HDL), other globulins (types alpha, beta and gamma), Prothrombin and Mannose-binding lectin (MBL). Any of these proteins, including classes of proteins, or derivatives thereof (such as fibrin which is derived from the cleavage of fibrinogen) can be selectively depleted from a biological sample prior to further analysis performed on the sample. Without being bound by theory, removal of such background proteins may facilitate more sensitive, accurate, or precise detection of the biomarkers of interest in the sample.

[0213] Abundant proteins in blood or blood derivatives (e.g., plasma or serum) include without limitation albumin, IgG, transferrin, fibrinogen, IgA, α₂-Macroglobulin, IgM, α₁-Antitrypsin, complement C3, haptoglobulin, apolipoprotein A1, apolipoprotein A3, apolipoprotein B, α₁-Acid Glycoprotein, ceruloplasmin, complement C4, C1q, IgD, prealbumin (transthyretin), and plasminogen. Such proteins can be depleted using commercially available columns and kits. Examples of such columns comprise the Multiple Affinity Removal System from Agilent Technologies (Santa Clara, Calif.). This system include various cartridges designed to deplete different protein profiles, including the following cartridges with performance characteristics according to the manufacturer: Human 14, which eliminates approximately 94% of total protein (albumin, IgG, antitrypsin, IgA, transferrin, haptoglobin, fibrinogen, alpha2-macroglobulin, alphal-acid glycoprotein (orosomucoid), IgM, apolipoprotein AI, apolipoprotein AII, complement C3 and transthyretin); Human 7, which eliminates approximately 85-90% of total protein (albumin, IgG, IgA, transferrin, haptoglobin, antitrypsin, and fibrinogen); Human 6, which eliminates approximately 85-90% of total protein (albumin, IgG, IgA, transferrin, haptoglobin, and antitrypsin); Human Albumin/IgG, which eliminates approximately 69% of total protein (albumin and IgG); and Human Albumin, which eliminates approximately 50-55% of total protein (albumin). The ProteoPrep® 20 Plasma Immunodepletion Kit from Sigma-Aldrich is intended to specifically remove the 20 most abundant proteins from human plasma or serum, which is about remove 97-98% of the total protein mass in plasma or serum (Sigma-Aldrich, St. Louis, Mo.). According to the manufacturer, the ProteoPrep® 20 removes: albumin, IgG, transferrin, fibrinogen, IgA, α₂-Macroglobulin, IgM, α₁-Antitrypsin, complement C3, haptoglobulin, apolipoprotein A1, A3 and B; α₁-Acid Glycoprotein, ceruloplasmin, complement C4, C1q; IgD, prealbumin, and plasminogen. Sigma-Aldrich also manufactures ProteoPrep® columns to remove albumin (HSA) and immunoglobulins (IgG). The ProteomeLab IgY-12 High Capacity Proteome Partitioning kits from Beckman Coulter (Fullerton, Calif.) are specifically designed to remove twelve highly abundant proteins (Albumin, IgG, Transferrin, Fibrinogen, IgA, α2-macroglobulin, IgM, α1-Antitrypsin, Haptoglobin, Orosomucoid, Apolipoprotein A-I, Apolipoprotein A-II) from the human biological fluids such as serum and plasma. Generally, such systems rely on immunodepletion to remove the target proteins, e.g., using small ligands and/or full antibodies. The PureProteome™ Human Albumin/Immunoglobulin Depletion Kit from Millipore (EMD Millipore Corporation, Billerica, Mass., USA) is a magnetic bead based kit that enables high depletion efficiency (typically >99%) of Albumin and all Immunoglobulins (i.e., IgG, IgA, IgM, IgE and IgD) from human serum or plasma samples. The ProteoExtract® Albumin/IgG Removal Kit, also from Millipore, is designed to deplete >80% of albumin and IgG from body fluid samples. Other similar protein depletion products include without limitation the following: Aurum™ Affi-Gels Blue mini kit (Bio-Rad, Hercules, Calif., USA); Vivapure® anti-HSA/IgG kit (Sartorius Stedim Biotech, Goettingen, Germany), Qproteome albumin/IgG depletion kit (Qiagen, Hilden, Germany); Seppro® MIXED12-LC20 column (GenWay Biotech, San Diego, Calif., USA); Abundant Serum Protein Depletion Kit (Norgen Biotek Corp., Ontario, Canada); GBC Human Albumin/IgG/Transferrin 3 in 1 Depletion Column/Kit (Good Biotech Corp., Taiwan). These systems and similar systems can be used to remove abundant proteins from a biological sample, thereby improving the ability to detect low abundance circulating biomarkers such as proteins and vesicles.

[0214] Thromboplastin is a plasma protein aiding blood coagulation through conversion of prothrombin to thrombin. Thrombin in turn acts as a serine protease that converts soluble fibrinogen into insoluble strands of fibrin, as well as catalyzing many other coagulation-related reactions. Thus, thromboplastin is a protein that can be used to facilitate precipitation of fibrinogen/fibrin (blood clotting factors) out of plasma. In addition to or as an alternative to immunoaffinity protein removal, a blood sample can be treated with thromboplastin to deplete fibrinogen/fibrin. Thromboplastin removal can be performed in addition to or as an alternative to immunoaffinity protein removal as described above using methods known in the art. Precipitation of other proteins and/or other sample particulate can also improve detection of circulating biomarkers such as vesicles in a sample. For example, ammonium sulfate treatment as known in the art can be used to precipitate immunoglobulins and other highly abundant proteins.

[0215] In an embodiment, the invention provides a method of detecting a presence or level of one or more circulating biomarker such as a microvesicle in a biological sample, comprising: (a) providing a biological sample comprising or suspected to comprise the one or more circulating biomarker; (b) selectively depleting one or more abundant protein from the biological sample provided in step (a); (c) performing affinity selection of the one or more circulating biomarker from the sample depleted in step (b), thereby detecting the presence or level of one or more circulating biomarker. The biological sample may comprise a bodily fluid, e.g., peripheral blood, sera, plasma, ascites, urine, cerebrospinal fluid (CSF), sputum, saliva, bone marrow, synovial fluid, aqueous humor, amniotic fluid, cerumen, breast milk, broncheoalveolar lavage fluid, semen, prostatic fluid, cowper's fluid or pre-ejaculatory fluid, female ejaculate, sweat, fecal matter, hair, tears, cyst fluid, pleural and peritoneal fluid, pericardial fluid, lymph, chyme, chyle, bile, interstitial fluid, menses, pus, sebum, vomit, vaginal secretions, mucosal secretion, stool water, pancreatic juice, lavage fluids from sinus cavities, bronchopulmonary aspirates, blastocyl cavity fluid, umbilical cord blood, or a derivative of any thereof. In some embodiments, the biological sample comprises peripheral blood, serum or plasma. Illustrative protocols and results from selectively depleting one or more abundant protein from blood plasma prior to vesicle detection can be found in Example 40 of International Patent Publication No. WO/2014/082083, filed Nov. 26, 2013, which patent publication is incorporated by reference herein in its entirety.

[0216] An abundant protein may comprise a protein in the sample that is present in the sample at a high enough concentration to potentially interfere with downstream processing or analysis. Typically, an abundant protein is not the target of any further analysis of the sample. The abundant protein may constitute at least 10⁻⁵, 10⁻⁴, 10⁻³, 0.01, 0.02, 0.03, 0.04, 0.05, 0.06, 0.07, 0.08, 0.09, 0.1, 0.2, 0.3, 0.4, 0.5, 0.6, 0.7, 0.8, 0.9, 1, 2, 3, 4, 5, 6, 7, 8, 9, 10, 11, 12, 13, 14, 15, 20, 25, 30, 35, 40, 45, 50, 55, 60, 65, 70, 75, 80, 85, 90, 95, 96, 97, 98 or at least 99% of the total protein mass in the sample. In some embodiments, the abundant protein is present at less than 10⁻⁵% of the total protein mass in the sample, e.g., in the case of a rare target of interest. As described herein, in the case of blood or a derivative thereof, the one or more abundant protein may comprise one or more of albumin, IgG, transferrin, fibrinogen, fibrin, IgA, α2-Marcroglobulin, IgM, α1-Antitrypsin, complement C3, haptoglobulin, apolipoprotein A1, A3 and B; α1-Acid Glycoprotein, ceruloplasmin, complement C4, C1q, IgD, prealbumin (transthyretin), plasminogen, a derivative of any thereof, and a combination thereof. The one or more abundant protein in blood or a blood derivative may also comprise one or more of Albumin, Immunoglobulins, Fibrinogen, Prealbumin, Alpha 1 antitrypsin, Alpha 1 acid glycoprotein, Alpha 1 fetoprotein, Haptoglobin, Alpha 2 macroglobulin, Ceruloplasmin, Transferrin, complement proteins C3 and C4, Beta 2 microglobulin, Beta lipoprotein, Gamma globulin proteins, C-reactive protein (CRP), Lipoproteins (chylomicrons, VLDL, LDL, HDL), other globulins (types alpha, beta and gamma), Prothrombin, Mannose-binding lectin (MBL), a derivative of any thereof, and a combination thereof.

[0217] In some embodiments, selectively depleting the one or more abundant protein comprises contacting the biological sample with thromboplastin to initiate precipitation of fibrin. The one or more abundant protein may also be depleted by immunoaffinity, precipitation, or a combination thereof. For example, the sample can be treated with thromboplastin to precipitate fibrin, and then the sample may be passed through a column to remove HSA, IgG, and other abundant proteins as desired.

[0218] “Selectively depleting” the one or more abundant protein comprises depleting the abundant protein from the sample at a higher percentage than depletion another entity in the sample, such as another protein or microvesicle, including a target of interest for downstream processing or analysis. Selectively depleting the one or more abundant protein may comprise depleting the abundant protein at a 1.1-fold, 1.2-fold, 1.3-fold, 1.4-fold, 1.5-fold, 1.6-fold, 1.7-fold, 1.8-fold, 1.9-fold, 2-fold, 3-fold, 4-fold, 5-fold, 6-fold, 7-fold, 8-fold, 9-fold, 10-fold, 11-fold, 12-fold, 13-fold, 14-fold, 15-fold, 16-fold, 17-fold, 18-fold, 19-fold, 20-fold, 25-fold, 30-fold, 40-fold, 50-fold, 60-fold, 70-fold, 80-fold, 90-fold, 100-fold, 200-fold, 300-fold, 400-fold, 500-fold, 600-fold, 700-fold, 800-fold, 900-fold, 1000-fold, 10⁴-fold, 10⁵-fold, 10⁶-fold, 10⁷-fold, 10⁸-fold, 10⁹-fold, 10¹⁰-fold, 10″-fold, 10¹²-fold, 10¹³-fold, 10¹⁴-fold, 10¹⁵-fold, 10¹⁶-fold, 10¹⁷-fold, 10¹⁸-fold, 10¹⁹-fold, 10²⁰-fold, or higher rate than another entity in the sample, such as another protein or microvesicle, including a target of interest for downstream processing or analysis. In an embodiment, there is little to no observable depletion of the target of interest as compared to the depletion of the abundant protein. In some embodiments, selectively depleting the one or more abundant protein from the biological sample comprises depleting at least 25%, 30%, 35%, 40%, 45%, 50%, 55%, 60%, 65%, 70%, 75%, 80%, 85%, 90%, 91%, 92%, 93%, 94%, 95%, 96%, 97%, 98%, 99% or 100% of the one or more abundant protein.

[0219] Removal of highly abundant proteins and other non-desired entities can further be facilitated with a non-stringent size exclusion step. For example, the sample can be processed using a high molecular weight cutoff size exclusion step to preferentially enrich high molecular weight vesicles apart from lower molecular weight proteins and other entities. In some embodiments, a sample is processed with a column (e.g., a gel filtration column) or filter having a molecular weight cutoff (MWCO) of 500, 600, 700, 800, 900, 1000, 1500, 2000, 2500, 3000, 3500, 4000, 4500, 5000, 5500, 6000, 6500, 7000, 7500, 8000, 8500, 9000, 9500, 10000, or greater than 10000 kiloDaltons (kDa). In an embodiment, a 700 kDa filtration column is used. In such a step, the vesicles will be retained or flow more slowly than the column or filter than the lower molecular weight entities. Such columns and filters are known in the art.

[0220] Isolation or enrichment of a vesicle from a biological sample can also be enhanced by use of sonication (for example, by applying ultrasound), detergents, other membrane-activating agents, or any combination thereof. For example, ultrasonic energy can be applied to a potential tumor site, and without being bound by theory, release of vesicles from a tissue can be increased, allowing an enriched population of vesicles that can be analyzed or assessed from a biological sample using one or more methods disclosed herein.

[0221] With methods of detecting circulating biomarkers as described here, e.g., antibody affinity isolation, the consistency of the results can be optimized as desired using various concentration or isolation procedures. Such steps can include agitation such as shaking or vortexing, different isolation techniques such as polymer based isolation, e.g., with PEG, and concentration to different levels during filtration or other steps. It will be understood by those in the art that such treatments can be applied at various stages of testing the vesicle containing sample. In one embodiment, the sample itself, e.g., a bodily fluid such as plasma or serum, is vortexed. In some embodiments, the sample is vortexed after one or more sample treatment step, e.g., vesicle isolation, has occurred. Agitation can occur at some or all appropriate sample treatment steps as desired. Additives can be introduced at the various steps to improve the process, e.g., to control aggregation or degradation of the biomarkers of interest.

[0222] The results can also be optimized as desireable by treating the sample with various agents. Such agents include additives to control aggregation and/or additives to adjust pH or ionic strength. Additives that control aggregation include blocking agents such as bovine serum albumin (BSA), milk or StabilGuard® (a BSA-free blocking agent; Product code SG02, Surmodics, Eden Prairie, Minn.), chaotropic agents such as guanidium hydro chloride, and detergents or surfactants. Useful ionic detergents include sodium dodecyl sulfate (SDS, sodium lauryl sulfate (SLS)), sodium laureth sulfate (SLS, sodium lauryl ether sulfate (SLES)), ammonium lauryl sulfate (ALS), cetrimonium bromide, cetrimonium chloride, cetrimonium stearate, and the like. Useful non-ionic (zwitterionic) detergents include polyoxyethylene glycols, polysorbate 20 (also known as Tween 20), other polysorbates (e.g., 40, 60, 65, 80, etc), Triton-X (e.g., X100, X114), 3-[(3-cholamidopropyl)dimethylammonio]-1-propanesulfonate (CHAPS), CHAPSO, deoxycholic acid, sodium deoxycholate, NP-40, glycosides, octyl-thio-glucosides, maltosides, and the like. In some embodiments, Pluronic F-68, a surfactant shown to reduce platelet aggregation, is used to treat samples containing vesicles during isolation and/or detection. F68 can be used from a 0.1% to 10% concentration, e.g., a 1%, 2.5% or 5% concentration. The pH and/or ionic strength of the solution can be adjusted with various acids, bases, buffers or salts, including without limitation sodium chloride (NaCl), phosphate-buffered saline (PBS), tris-buffered saline (TBS), sodium phosphate, potassium chloride, potassium phosphate, sodium citrate and saline-sodium citrate (SSC) buffer. In some embodiments, NaCl is added at a concentration of 0.1% to 10%, e.g., 1%, 2.5% or 5% final concentration. In some embodiments, Tween 20 is added to 0.005 to 2% concentration, e.g., 0.05%, 0.25% or 0.5% final concentration. Blocking agents for use with the invention comprise inert proteins, e.g., milk proteins, non-fat dry milk protein, albumin, BSA, casein, or serum such as newborn calf serum (NBCS), goat serum, rabbit serum or salmon serum. The proteins can be added at a 0.1% to 10% concentration, e.g., 1%, 2%, 3%, 3.5%, 4%, 5%, 6%, 7%, 8%, 9% or 10% concentration. In some embodiments, BSA is added to 0.1% to 10% concentration, e.g., 1%, 2%, 3%, 3.5%, 4%, 5%, 6%, 7%, 8%, 9% or 10% concentration. In an embodiment, the sample is treated according to the methodology presented in U.S. patent application Ser. No. 11/632946, filed Jul. 13, 2005, which application is incorporated herein by reference in its entirety. Commercially available blockers may be used, such as SuperBlock, StartingBlock, Protein-Free from Pierce (a division of Thermo Fisher Scientific, Rockford, Ill.). In some embodiments, SSC/detergent (e.g., 20×SSC with 0.5% Tween 20 or 0.1% Triton-X 100) is added to 0.1% to 10% concentration, e.g., at 1.0% or 5.0% concentration.

[0223] The methods of detecting vesicles and other circulating biomarkers can be optimized as desired with various combinations of protocols and treatments as described herein. A detection protocol can be optimized by various combinations of agitation, isolation methods, and additives. In some embodiments, the patient sample is vortexed before and after isolation steps, and the sample is treated with blocking agents including BSA and/or F68. Such treatments may reduce the formation of large aggregates or protein or other biological debris and thus provide a more consistent detection reading.

[0224] Filtration and Ultrafiltration

[0225] A vesicle can be isolated from a biological sample by filtering a biological sample from a subject through a filtration module and collecting from the filtration module a retentate comprising the vesicle, thereby isolating the vesicle from the biological sample. The method can comprise filtering a biological sample from a subject through a filtration module comprising a filter (also referred to herein as a selection membrane); and collecting from the filtration module a retentate comprising the vesicle, thereby isolating the vesicle from the biological sample. For example, in one embodiment, the filter retains molecules greater than about 100 kiloDaltons. In such cases, microvesicles are generally found within the retentate of the filtration process whereas smaller entities such as proteins, protein complexes, nucleic acids, etc, pass through into the filtrate.

[0226] The method can be used when determining a biosignature of one or more microvesicle. The method can also further comprise contacting the retentate from the filtration to a plurality of substrates, wherein each substrate is coupled to one or more capture agents, and each subset of the plurality of substrates comprises a different capture agent or combination of capture agents than another subset of the plurality of substrates.

[0227] Also provided herein is a method of determining a biosignature of a vesicle in a sample comprising: filtering a biological sample from a subject with a disorder through a filtration module, collecting from the filtration module a retentate comprising one or more vesicles, and determining a biosignature of the one or more vesicles. In one embodiment, the filtration module comprises a filter that retains molecules greater than about 100 or 150 kiloDaltons.

[0228] The method disclosed herein can further comprise characterizing a phenotype in a subject by filtering a biological sample from a subject through a filtration module, collecting from the filtration module a retentate comprising one or more vesicles; detecting a biosignature of the one or more vesicles; and characterizing a phenotype in the subject based on the biosignature, wherein characterizing is with at least 70% sensitivity. In some embodiments, characterizing comprises determining an amount of one or more vesicle having the biosignature. Furthermore, the characterizing can be from about 80% to 100% sensitivity.

[0229] Also provided herein is a method for multiplex analysis of a plurality of vesicles. In some embodiments, the method comprises filtering a biological sample from a subject through a filtration module; collecting from the filtration module a retentate comprising the plurality of vesicles, applying the plurality of vesicles to a plurality of capture agents, wherein the plurality of capture agents is coupled to a plurality of substrates, and each subset of the plurality of substrates is differentially labeled from another subset of the plurality of substrates; capturing at least a subset of the plurality of vesicles; and determining a biosignature for at least a subset of the captured vesicles. In one embodiment, each substrate is coupled to one or more capture agents, and each subset of the plurality of substrates comprises a different capture agent or combination of capture agents as compared to another subset of the plurality of substrates. In some embodiments, at least a subset of the plurality of substrates is intrinsically labeled, such as comprising one or more labels. The substrate can be a particle or bead, or any combination thereof. In some embodiments, the filter retains molecules greater than 1, 2, 3, 4, 5, 6, 7, 8, 9, 10, 15, 20, 25, 30, 40, 50, 60, 70, 80, 90, 100, 110, 120, 130, 140, 150, 160, 170, 180, 190, 200, 250, 300, 400, 500, 600, 700, 800, 900, 1000, 1500, 2000, 2500, 3000, 3500, 4000, 4500, 5000, 5500, 6000, 6500, 7000, 7500, 8000, 8500, 9000, 9500, 10000, or greater than 10000 kiloDaltons (kDa). In one embodiment, the filtration module comprises a filter that retains molecules greater than about 100 or 150 kiloDaltons. In one embodiment, the filtration module comprises a filter that retains molecules greater than about 9, 20, 100 or 150 kiloDaltons. In still another embodiment, the filtration module comprises a filter that retains molecules greater than about 7000 kDa.

[0230] In some embodiments, the method for multiplex analysis of a plurality of vesicles comprises filtering a biological sample from a subject through a filtration module, wherein the filtration module comprises a filter that retains molecules greater than about 100 kiloDaltons; collecting from the filtration module a retentate comprising the plurality of vesicles; applying the plurality of vesicles to a plurality of capture agents, wherein the plurality of capture agents is coupled to a microarray; capturing at least a subset of the plurality of vesicles on the microarray; and determining a biosignature for at least a subset of the captured vesicles. In some embodiments, the filter retains molecules greater than 1, 2, 3, 4, 5, 6, 7, 8, 9, 10, 15, 20, 25, 30, 40, 50, 60, 70, 80, 90, 100, 110, 120, 130, 140, 150, 160, 170, 180, 190, 200, 250, 300, 400, 500, 600, 700, 800, 900, 1000, 1500, 2000, 2500, 3000, 3500, 4000, 4500, 5000, 5500, 6000, 6500, 7000, 7500, 8000, 8500, 9000, 9500, 10000, or greater than 10000 kiloDaltons (kDa). In one embodiment, the filtration module comprises a filter that retains molecules greater than about 100 or 150 kiloDaltons. In one embodiment, the filtration module comprises a filter that retains molecules greater than about 9, 20, 100 or 150 kiloDaltons. In still another embodiment, the filtration module comprises a filter that retains molecules greater than about 7000 kDa.

[0231] The biological sample can be clarified prior to isolation by filtration. Clarification comprises selective removal of cellular debris and other undesirable materials. For example, cellular debris and other components that may interfere with detection of the circulating biomarkers can be removed. The clarification can be by low-speed centrifugation, such as at about 5,000×g, 4,000×g, 3,000×g, 2,000×g, 1,000×g, or less. The supernatant, or clarified biological sample, containing the vesicle can then be collected and filtered to isolate the vesicle from the clarified biological sample. In some embodiments, the biological sample is not clarified prior to isolation of a vesicle by filtration.

[0232] In some embodiments, isolation of a vesicle from a sample does not use high-speed centrifugation, such as ultracentrifugation. For example, isolation may not require the use of centrifugal speeds, such as about 100,000×g or more. In some embodiments, isolation of a vesicle from a sample uses speeds of less than 50,000×g, 40,000×g, 30,000×g, 20,000×g, 15,000×g, 12,000×g, or 10,000×g.

[0233] Any number of applicable filter configurations can be used to filter a sample of interest. In some embodiments, the filtration module used to isolate the circulating biomarkers from the biological sample is a fiber-based filtration cartridge. For example, the fiber can be a hollow polymeric fiber, such as a polypropylene hollow fiber. A biological sample can be introduced into the filtration module by pumping the sample fluid, such as a biological fluid as disclosed herein, into the module with a pump device, such as a peristaltic pump. The pump flow rate can vary, such as at about 0.25, 0.5, 1, 1.5, 2, 2.5, 3, 3.5, 4, 4.5, 5, 6, 7, 8, 9, or 10 mL/minute. The flow rate can be adjusted given the configuration, e.g., size and throughput, of the filtration module.

[0234] The filtration module can be a membrane filtration module. For example, the membrane filtration module can comprise a filter disc membrane, such as a hydrophilic polyvinylidene difluoride (PVDF) filter disc membrane housed in a stirred cell apparatus (e.g., comprising a magnetic stirrer). In some embodiments, the sample moves through the filter as a result of a pressure gradient established on either side of the filter membrane.

[0235] The filter can comprise a material having low hydrophobic absorptivity and/or high hydrophilic properties. For example, the filter can have an average pore size for vesicle retention and permeation of most proteins as well as a surface that is hydrophilic, thereby limiting protein adsorption. For example, the filter can comprise a material selected from the group consisting of polypropylene, PVDF, polyethylene, polyfluoroethylene, cellulose, secondary cellulose acetate, polyvinylalcohol, and ethylenevinyl alcohol (EVAL®, Kuraray Co., Okayama, Japan). Additional materials that can be used in a filter include, but are not limited to, polysulfone and polyethersulfone.

[0236] The filtration module can have a filter that retains molecules greater than about 1, 2, 3, 4, 5, 6, 7, 8, 9, 10, 15, 20, 25, 30, 40, 50, 60, 70, 80, 90, 100, 110, 120, 130, 140, 150, 160, 170, 180, 190, 200, 250, 300, 400, 500, 600, 700, 800, or 900 kiloDaltons (kDa), such as a filter that has a MWCO (molecular weight cut off) of about 1, 2, 3, 4, 5, 6, 7, 8, 9, 10, 15, 20, 25, 30, 40, 50, 60, 70, 80, 90, 100, 110, 120, 130, 140, 150, 160, 170, 180, 190, 200, 250, 300, 400, 500, 600, 700, 800, or 900 kDa, respectively. In embodiments, the filtration module has a MWCO of 1000 kDa, 1500 kDa, 2000 kDa, 2500 kDa, 3000 kDa, 3500 kDa, 4000 kDa, 4500 kDa, 5000 kDa, 5500 kDa, 6000 kDa, 6500 kDa, 7000 kDa, 7500 kDa, 8000 kDa, 8500 kDa, 9000 kDa, 9500 kDa, 10000 kDa, or greater than 10000 kDa. Ultrafiltration membranes with a range of MWCO of 9 kDa, 20 kDa and/or 150 kDa can be used. In some embodiments, the filter within the filtration module has an average pore diameter of about 0.01 μm to about 0.15 μm, and in some embodiments from about 0.05 μm to about 0.12 μm. In some embodiments, the filter has an average pore diameter of about 0.06 μm, 0.07 μm, 0.08 μm, 0.09 μm, 0.1 μm, 0.11 mm or 0.2 μm.

[0237] The filtration module can be a commerically available column, such as a column typically used for concentrating proteins or for isolating proteins (e.g., ultrafiltration). Examples include, but are not limited to, columns from Millpore (Billerica, Mass.), such as Amicon® centrifugal filters, or from Pierce® (Rockford, Ill.), such as Pierce Concentrator filter devices. Useful columns from Pierce include disposable ultrafiltration centrifugal devices with a MWCO of 9 kDa, 20 kDa and/or 150 kDa. These concentrators consist of a high-performance regenerated cellulose membrane welded to a conical device. The filters can be as described in U.S. Pat. No. 6,269,957 or 6,357,601, both of which applications are incorporated by reference in their entirety herein.

[0238] The retentate comprising the isolated vesicle can be collected from the filtration module. The retentate can be collected by flushing the retentate from the filter. Selection of a filter composition having hydrophilic surface properties, thereby limiting protein adsorption, can be used, without being bound by theory, for easier collection of the retentate and minimize use of harsh or time-consuming collection techniques.

[0239] The collected retentate can then be used subsequent analysis, such as assessing a biosignature of one or more vesicles in the retentate, as further described herein. The analysis can be directly performed on the collected retentate. Alternatively, the collected retentate can be further concentrated or purified, prior to analysis of one or more vesicles. For example, the retentate can be further concentrated or vesicles further isolated from the retentate using size exclusion chromatography, density gradient centrifugation, differential centrifugation, immunoabsorbent capture, affinity purification, microfluidic separation, or combinations thereof, such as described herein. In some embodiments, the retentate can undergo another step of filtration. Alternatively, prior to isolation of a vesicle using a filter, the vesicle is concentrated or isolated using techniques including without limitation size exclusion chromatography, density gradient centrifugation, differential centrifugation, immunoabsorbent capture, affinity purification, microfluidic separation, or combinations thereof.

[0240] Combinations of filters can be used for concentrating and isolating biomarkers. For example, the biological sample may first be filtered through a filter having a porosity or pore size of between about 0.01 μm to about 10 μm, e.g., 0.01 μm to about 2 μm or about 0.05 μm to about 1.5 μm, and then the sample is filtered. For example, prior to filtering a biological sample through a filtration module with a filter that retains molecules greater than about 1, 2, 3, 4, 5, 6, 7, 8, 9, 10, 15, 20, 25, 30, 40, 50, 60, 70, 80, 90, 100, 110, 120, 130, 140, 150, 160, 170, 180, 190, 200, 250, 300, 400, 500, 600, 700, 800, 900, 1000, 1500, 2000, 2500, 3000, 3500, 4000, 4500, 5000, 5500, 6000, 6500, 7000, 7500, 8000, 8500, 9000, 9500, 10000, or greater than 10000 kiloDaltons (kDa), such as a filter that has a MWCO (molecular weight cut off) of about 1, 2, 3, 4, 5, 6, 7, 8, 9, 10, 15, 20, 25, 30, 40, 50, 60, 70, 80, 90, 100, 110, 120, 130, 140, 150, 160, 170, 180, 190, 200, 250, 300, 400, 500, 600, 700, 800, 900, 1000, 1500, 2000, 2500, 3000, 3500, 4000, 4500, 5000, 5500, 6000, 6500, 7000, 7500, 8000, 8500, 9000, 9500, 10000, or greater than 10000 kDa, respectively, the biological sample may first be filtered through a filter having a porosity or pore size of between about 0.01 μm to about 10 μm, e.g., 0.01 μm to about 2 μm or about 0.05 μm to about 1.5 μm.

[0241] In some embodiments, the filter has a pore size of about 0.01, 0.02, 0.03, 0.04, 0.05, 0.06, 0.07, 0.08, 0.09, 0.1, 0.2, 0.3, 0.4, 0.5, 0.6, 0.7, 0.8, 0.9, 1.0, 1.1, 1.2, 1.3, 1.4, 1.5, 1.6, 1.7, 1.8, 1.9 or 2.0, 3.0, 4.0, 5.0, 6.0, 7.0, 8.0, 9.0 or 10.0 μm. The filter may be a syringe filter. Thus, in one embodiment, the method comprises filtering the biological sample through a filter, such as a syringe filter, wherein the syringe filter has a porosity of greater than about 1 μm, prior to filtering the sample through a filtration module comprising a filter that retains molecules greater than about 100 or 150 kiloDaltons. In an embodiment, the filter is 1.2 μM filter and the filtration is followed by passage of the sample through a 7 ml or 20 ml concentrator column with a 150 kDa cutoff. Multiple concentrator columns may be used, e.g., in series. For example, a 7000 MWCO filtration unit can be used before a 150 MWCO unit.

[0242] The filtration module can be a component of a microfluidic device. Microfluidic devices, which may also be referred to as “lab-on-a-chip” systems, biomedical micro-electro-mechanical systems (bioMEMs), or multicomponent integrated systems, can be used for isolating, and analyzing, vesicles. Such systems miniaturize and compartmentalize processes that allow for binding of vesicles, detection of biomarkers, and other processes, such as further described herein.

[0243] The filtration module and assessment can be as described in Grant, R., et al., A filtration-based protocol to isolate human Plasma Membrane-derived Vesicles and exosomes from blood plasma, J Immunol Methods (2011) 371:143-51 (Epub 2011 Jun. 30), which reference is incorporated herein by reference in its entirety.

[0244] A microfluidic device can also be used for isolation of a vesicle by comprising a filtration module. For example, a microfluidic device can use one more channels for isolating a vesicle from a biological sample based on size from a biological sample. A biological sample can be introduced into one or more microfluidic channels, which selectively allows the passage of vesicles. The microfluidic device can further comprise binding agents, or more than one filtration module to select vesicles based on a property of the vesicles, for example, size, shape, deformability, biomarker profile, or biosignature.

[0245] The retentate from a filtration step can be further processed before assessment of microvesicles or other biomarkers therein. In an embodiment, the retentate is diluted prior to biomarker assessment, e.g., with an appropriate diluent such as a biologically compatible buffer. In some cases, the retentate is serially diluted. In an aspect, the invention provides a method for detecting a microvesicle population from a biological sample comprising: a) concentrating the biological sample using a selection membrane having a pore size of from 0.01 μm to about 10 μm, or a molecular weight cut off (MWCO) from about 1 kDa to 10000 kDa; b) diluting a retentate from the concentration step into one or more aliquots; and c) contacting each of the one or more aliquots of retentate with one or more binding agent specific to a molecule of at least one microvesicle in the microvesicle population. In a related aspect, the invention provides a method for detecting a microvesicle population from a biological sample comprising: a) concentrating the biological sample using a selection membrane having a pore size of from 0.01 μm to about 10 μm, or a molecular weight cut off (MWCO) from about 1 kDa to 10000 kDa; and b) contacting one or more aliquots of the retentate from the concentrating step with one or more binding agent specific to a molecule of at least one microvesicle in the microvesicle population.

[0246] The selection membrane can be sized to retain the desired biomarkers in the retentate or to allow the desired biomarkers to pass through the filter into the filtrate. The filter membrane can be chosen to have a certain pore size or MWCO value. The selection membrane can have a pore size of about 0.01, 0.02, 0.03, 0.04, 0.05, 0.06, 0.07, 0.08, 0.09, 0.1, 0.2, 0.3, 0.4, 0.5, 0.6, 0.7, 0.8, 0.9, 1.0, 1.1, 1.2, 1.3, 1.4, 1.5, 1.6, 1.7, 1.8, 1.9 or 2.0, 3.0, 4.0, 5.0, 6.0, 7.0, 8.0, 9.0 or 10.0 μm. The selection membrane can also have a MWCO of about 1, 2, 3, 4, 5, 6, 7, 8, 9, 10, 15, 20, 25, 30, 40, 50, 60, 70, 80, 90, 100, 110, 120, 130, 140, 150, 160, 170, 180, 190, 200, 250, 300, 400, 500, 600, 700, 800, 900, 1000, 2000, 3000, 4000, 5000, 6000, 7000, 8000, 9000 or 10000 kDa.

[0247] The retentate can be separated and/or diluted into any number of desired aliquots. For example, multiple aliquots without any dilution or the same dilution can be used to determine reproducibility. In another example, multiple aliquots at different dilutions can be used to construct a concentration curve. In an embodiment, the retentate is separated and/or diluted into at least 1, 2, 3, 4, 5, 6, 7, 8, 9, 10, 11, 12, 13, 14, 15, 16, 17, 18, 19, 20, 25, 30, 35, 40, 45, 50, 55, 60, 65, 70, 75, 80, 85, 90, 95, 100, 150, 200, 250, 300, 350 or 400 aliquots. The aliquots can be at a same dilution or at different dilutions.

[0248] A dilution factor is the ratio of the final volume of a mixture (the mixture of the diluents and aliquot) divided by the initial volume of the aliquot. The retentate can be diluted into one or more aliquots at a dilution factor of about 0, 1, 2, 3, 4, 5, 6, 7, 8, 9, 10, 15, 20, 25, 30, 40, 50, 60, 70, 80, 90, 100, 110, 120, 130, 140, 150, 160, 170, 180, 190, 200, 250, 300, 400, 500, 600, 700, 800, 900, 1000, 1500, 2000, 2500, 3000, 3500, 4000, 4500, 5000, 5500, 6000, 6500, 7000, 7500, 8000, 8500, 9000, 9500, 10000, 20000, 30000, 40000, 50000, 60000, 70000, 80000, 90000 and/or 100000. For example, the retentate can be diluted into one or more aliquot at a dilution factor of about 500.

[0249] To estimate a concentration or form a curve, the retentate can be diluted into multiple aliquots. In an embodiment of the method, the retentate is diluted into one or more aliquots at a dilution factor of about 100, 250, 500, 1000, 10000 and 100000. As desired, the method can further comprise detecting an amount of microvesicles in each aliquot of retentate, e.g., that formed a complex with the one or more binding agent. The curve can be used to determine a linear range of the amount of microvesicles in each aliquot detected versus dilution factor. A concentration of the detected microvesicles for the biological sample can be determined using the amount of microvesicles determined in one or more aliquot within the linear range. The concentration can be compared to a reference concentration, e.g., in order to characterize a phenotype as described herein.

[0250] The invention also provides a related method comprising filtering a biological sample from a subject through a filtration module and collecting a filtrate comprising the vesicle, thereby isolating the vesicle from the biological sample. In such cases cells and other large entities can be retained in the retentate while microvesicles pass through into the filtrate. It will be appreciated that strategies to retain and filter microvesicles can be used in concert. For example, a sample can be filtered with a selection membrane that allows microvesicles to pass through, thereby isolating the microvesicles from large particles (cells, complexes, etc). The filtrate comprising the microvesicle can then be filtered using a selection membrane that retains microvesicles, thereby isolating the microvesicles from smaller particles (proteins, nucleic acids, etc). The isolated microvesicles can be further assessed according to the methods of the invention, e.g., to characterize a phenotype.

[0251] Precipitation

[0252] Vesicles can be isolated using a polymeric precipitation method. The method can be in combination with or in place of the other isolation methods described herein. In one embodiment, the sample containing the vesicles is contacted with a formulation of polyethylene glycol (PEG). The polymeric formulation is incubated with the vesicle containing sample then precipitated by centrifugation. The PEG can bind to the vesicles and can be treated to specifically capture vesicles by addition of a capture moiety, e.g., a pegylated-binding protein such as an antibody. One of skill will appreciate that other polymers in addition to PEG can be used, e.g., PEG derivatives including methoxypolyethylene glycols, poly (ethylene oxide), and various polymers of formula HO—CH₂—(CH₂—O—CH₂-)n-CH₂—OH having different molecular weights. The efficiency of isolation may depend on various factors including the length of the polymer chains and concentration of polymer used. In preferred embodiments, PEG4000 or PEG 8000 may be used at a concentration of 1%, 2%, 3%, 4%, 5%, 6%, 7%, 8%, 9%, or 10%, e.g., 4% or 8%.

[0253] In some embodiments of the invention, the vesicles are concentrated from a sample using the polymer precipitation method and the isolated vesicles are further separated using another approach. The second step can be used to identify a subpopulation of vesicles, e.g., that display certain biomarkers. The second separation step can comprise size exclusion, a binding agent, an antibody capture step, microbeads, as described herein.

[0254] In an embodiment, vesicles are isolated according to the ExoQuick™ and ExoQuick-TC™ kits from System Biosciences, Mountain View, Calif. USA. These kits use a polymer-based precipitation method to pellet vesicles. Similarly, the vesicles can be isolated using the Total Exosome Isolation (from Serum) or Total Exosome Isolation (from Cell Culture Media) kits from Invitrogen/Life Technologies (Carlsbad, Calif. USA). The Total Exosome Isolation reagent forces less-soluble components such as vesicles out of solution, allowing them to be collected by a short, low-speed centrifugation. The reagent is added to the biological sample, and the solution is incubated overnight at 2° C. to 8° C. The precipitated vesicles are recovered by standard centrifugation.

[0255] Binding Agents

[0256] Binding agents (also referred to as binding reagents) include agents that are capable of binding a target biomarker. A binding agent can be specific for the target biomarker, meaning the agent is capable of binding a target biomarker. The target can be any useful biomarker disclosed herein, such as a biomarker on the vesicle surface. In some embodiments, the target is a single molecule, such as a single protein, so that the binding agent is specific to the single protein. In other embodiments, the target can be a group of molecules, such as a family or proteins having a similar epitope or moiety, so that the binding agent is specific to the family or group of proteins. The group of molecules can also be a class of molecules, such as protein, DNA or RNA. The binding agent can be a capture agent used to capture a vesicle by binding a component or biomarker of a vesicle. In some embodiments, a capture agent comprises an antibody or fragment thereof, or an aptamer, that binds to an antigen on a vesicle. The capture agent can be optionally coupled to a substrate and used to isolate a vesicle, as further described herein.

[0257] A binding agent is an agent that binds to a circulating biomarker, such as a vesicle or a component of a vesicle. The binding agent can be used as a capture agent and/or a detection agent. A capture agent can bind and capture a circulating biomarker, such as by binding a component or biomarker of a vesicle. For example, the capture agent can be a capture antibody or capture antigen that binds to an antigen on a vesicle. A detection agent can bind to a circulating biomarker thereby facilitating detection of the biomarker. For example, a capture agent comprising an antibody or aptamer that is sequestered to a substrate can be used to capture a vesicle in a sample, and a detection agent comprising an antibody or aptamer that carries a label can be used to detect the captured vesicle via detection of the detection agent's label. In some embodiments, a vesicle is assessed using capture and detection agents that recognize the same vesicle biomarkers. For example, a vesicle population can be captured using a tetraspanin such as by using an anti-CD9 antibody bound to a substrate, and the captured vesicles can be detected using a fluorescently labeled anti-CD9 antibody to label the captured vesicles. In other embodiments, a vesicle is assessed using capture and detection agents that recognize different vesicle biomarkers. For example, a vesicle population can be captured using a cell-specific marker such as by using an anti-PCSA antibody bound to a substrate, and the captured vesicles can be detected using a fluorescently labeled anti-CD9 antibody to label the captured vesicles. Similarly, the vesicle population can be captured using a general vesicle marker such as by using an anti-CD9 antibody bound to a substate, and the captured vesicles can be detected using a fluorescently labeled antibody to a cell-specific or disease specific marker to label the captured vesicles.

[0258] The biomarkers recognized by the binding agent are sometimes referred to herein as an antigen. Unless otherwise specified, antigen as used herein is meant to encompass any entity that is capable of being bound by a binding agent, regardless of the type of binding agent or the immunogenicity of the biomarker. The antigen further encompasses a functional fragment thereof. For example, an antigen can encompass a protein biomarker capable of being bound by a binding agent, including a fragment of the protein that is capable of being bound by a binding agent.

[0259] In one embodiment, a vesicle is captured using a capture agent that binds to a biomarker on a vesicle. The capture agent can be coupled to a substrate and used to isolate a vesicle, as further described herein. In one embodiment, a capture agent is used for affinity capture or isolation of a vesicle present in a substance or sample.

[0260] A binding agent can be used after a vesicle is concentrated or isolated from a biological sample. For example, a vesicle can first be isolated from a biological sample before a vesicle with a specific biosignature is isolated or detected. The vesicle with a specific biosignature can be isolated or detected using a binding agent for the biomarker. A vesicle with the specific biomarker can be isolated or detected from a heterogeneous population of vesicles. Alternatively, a binding agent may be used on a biological sample comprising vesicles without a prior isolation or concentration step. For example, a binding agent is used to isolate or detect a vesicle with a specific biosignature directly from a biological sample.

[0261] A binding agent can be a nucleic acid, protein, or other molecule that can bind to a component of a vesicle. The binding agent can comprise DNA, RNA, monoclonal antibodies, polyclonal antibodies, Fabs, Fab′, single chain antibodies, synthetic antibodies, aptamers (DNA/RNA), peptoids, zDNA, peptide nucleic acids (PNAs), locked nucleic acids (LNAs), lectins, synthetic or naturally occurring chemical compounds (including but not limited to drugs, labeling reagents), dendrimers, or a combination thereof. For example, the binding agent can be a capture antibody. In embodiments of the invention, the binding agent comprises a membrane protein labeling agent. See, e.g., the membrane protein labeling agents disclosed in Alroy et al., US. Patent Publication US 2005/0158708. In an embodiment, vesicles are isolated or captured as described herein, and one or more membrane protein labeling agent is used to detect the vesicles.

[0262] In some instances, a single binding agent can be employed to isolate or detect a vesicle. In other instances, a combination of different binding agents may be employed to isolate or detect a vesicle. For example, at least 2, 3, 4, 5, 6, 7, 8, 9, 10, 11, 12, 13, 14, 15, 16, 17, 18, 19, 20, 25, 50, 75 or 100 different binding agents may be used to isolate or detect a vesicle from a biological sample. Furthermore, the one or more different binding agents for a vesicle can form a biosignature of a vesicle, as further described below.

[0263] Different binding agents can also be used for multiplexing. For example, isolation or detection of more than one population of vesicles can be performed by isolating or detecting each vesicle population with a different binding agent. Different binding agents can be bound to different particles, wherein the different particles are labeled. In another embodiment, an array comprising different binding agents can be used for multiplex analysis, wherein the different binding agents are differentially labeled or can be ascertained based on the location of the binding agent on the array. Multiplexing can be accomplished up to the resolution capability of the labels or detection method, such as described below. The binding agents can be used to detect the vesicles, such as for detecting cell-of-origin specific vesicles. A binding agent or multiple binding agents can themselves form a binding agent profile that provides a biosignature for a vesicle. One or more binding agents can be selected from FIG. 2 of International Patent Publication No. WO/2011/127219, entitled “Circulating Biomarkers for Disease” and filed Apr. 6, 2011, which application is incorporated by reference in its entirety herein. For example, if a vesicle population is detected or isolated using two, three, four or more binding agents in a differential detection or isolation of a vesicle from a heterogeneous population of vesicles, the particular binding agent profile for the vesicle population provides a biosignature for the particular vesicle population. The vesicle can be detected using any number of binding agents in a multiplex fashion. Thus, the binding agent can also be used to form a biosignature for a vesicle. The biosignature can be used to characterize a phenotype.

[0264] The binding agent can be a lectin. Lectins are proteins that bind selectively to polysaccharides and glycoproteins and are widely distributed in plants and animals. For example, lectins such as those derived from Galanthus nivalis in the form of Galanthus nivalis agglutinin (“GNA”), Narcissus pseudonarcissus in the form of Narcissus pseudonarcissus agglutinin (“NPA”) and the blue green algae Nostoc ellipsosporum called “cyanovirin” (Boyd et al. Antimicrob Agents Chemother 41(7): 1521 1530, 1997; Hammar et al. Ann NY Acad Sci 724: 166 169, 1994; Kaku et al. Arch Biochem Biophys 279(2): 298 304, 1990) can be used to isolate a vesicle. These lectins can bind to glycoproteins having a high mannose content (Chervenak et al. Biochemistry 34(16): 5685 5695, 1995). High mannose glycoprotein refers to glycoproteins having mannose-mannose linkages in the form of α-1→3 or α-1→6 mannose-mannose linkages.

[0265] The binding agent can be an agent that binds one or more lectins. Lectin capture can be applied to the isolation of the biomarker cathepsin D since it is a glycosylated protein capable of binding the lectins Galanthus nivalis agglutinin (GNA) and concanavalin A (ConA).

[0266] Methods and devices for using lectins to capture vesicles are described in International Patent Publications WO/2011/066589, entitled “METHODS AND SYSTEMS FOR ISOLATING, STORING, AND ANALYZING VESICLES” and filed Nov. 30, 2010; WO/2010/065765, entitled “AFFINITY CAPTURE OF CIRCULATING BIOMARKERS” and filed Dec. 3, 2009; WO/2010/141862, entitled “METHODS AND MATERIALS FOR ISOLATING EXOSOMES” and filed Jun. 4, 2010; and WO/2007/103572, entitled “EXTRACORPOREAL REMOVAL OF MICROVESICULAR PARTICLES” and filed Mar. 9, 2007, each of which applications is incorporated by reference herein in its entirety.

[0267] The binding agent can be an antibody. For example, a vesicle may be isolated using one or more antibodies specific for one or more antigens present on the vesicle. For example, a vesicle can have CD63 on its surface, and an antibody, or capture antibody, for CD63 can be used to isolate the vesicle. Alternatively, a vesicle derived from a tumor cell can express EpCam, the vesicle can be isolated using an antibody for EpCam and CD63. Other antibodies for isolating vesicles can include an antibody, or capture antibody, to CD9, PSCA, TNFR, CD63, B7H3, MFG-E8, EpCam, Rab, CD81, STEAP, PCSA, PSMA, or 5T4. Other antibodies for isolating vesicles can include an antibody, or capture antibody, to DR3, STEAP, epha2, TMEM211, MFG-E8, Tissue Factor (TF), unc93A, A33, CD24, NGAL, EpCam, MUC17, TROP2, or TETS.

[0268] In some embodiments, the capture agent is an antibody to CD9, CD63, CD81, PSMA, PCSA, B7H3, EpCam, PSCA, ICAM, STEAP, or EGFR. The capture agent can also be used to identify a biomarker of a vesicle. For example, a capture agent such as an antibody to CD9 would identify CD9 as a biomarker of the vesicle. In some embodiments, a plurality of capture agents can be used, such as in multiplex analysis. The plurality of captures agents can comprise binding agents to one or more of: CD9, CD63, CD81, PSMA, PCSA, B7H3, EpCam, PSCA, ICAM, STEAP, and EGFR. In some embodiments, the plurality of capture agents comprise binding agents to CD9, CD63, CD81, PSMA, PCSA, B7H3, MFG-E8, and/or EpCam. In yet other embodiments, the plurality of capture agents comprises binding agents to CD9, CD63, CD81, PSMA, PCSA, B7H3, EpCam, PSCA, ICAM, STEAP, and/or EGFR. The plurality of capture agents comprises binding agents to TMEM211, MFG-E8, Tissue Factor (TF), and/or CD24.

[0269] The antibodies referenced herein can be immunoglobulin molecules or immunologically active portions of immunoglobulin molecules, i.e., molecules that contain an antigen binding site that specifically binds an antigen and synthetic antibodies. The immunoglobulin molecules can be of any class (e.g., IgG, IgE, IgM, IgD or IgA) or subclass of immunoglobulin molecule. Antibodies include, but are not limited to, polyclonal, monoclonal, bispecific, synthetic, humanized and chimeric antibodies, single chain antibodies, Fab fragments and F(ab′)₂ fragments, Fv or Fv′ portions, fragments produced by a Fab expression library, anti-idiotypic (anti-Id) antibodies, or epitope-binding fragments of any of the above. An antibody, or generally any molecule, “binds specifically” to an antigen (or other molecule) if the antibody binds preferentially to the antigen, and, e.g., has less than about 30%, 20%, 10%, 5% or 1% cross-reactivity with another molecule.

[0270] The binding agent can also be a polypeptide or peptide. Polypeptide is used in its broadest sense and may include a sequence of subunit amino acids, amino acid analogs, or peptidomimetics. The subunits may be linked by peptide bonds. The polypeptides may be naturally occurring, processed forms of naturally occurring polypeptides (such as by enzymatic digestion), chemically synthesized or recombinantly expressed. The polypeptides for use in the methods of the present invention may be chemically synthesized using standard techniques. The polypeptides may comprise D-amino acids (which are resistant to L-amino acid-specific proteases), a combination of D- and L-amino acids, β amino acids, or various other designer or non-naturally occurring amino acids (e.g., β-methyl amino acids, Cα-methyl amino acids, and Nα-methyl amino acids, etc.) to convey special properties. Synthetic amino acids may include ornithine for lysine, and norleucine for leucine or isoleucine. In addition, the polypeptides can have peptidomimetic bonds, such as ester bonds, to prepare polypeptides with novel properties. For example, a polypeptide may be generated that incorporates a reduced peptide bond, i.e., R₁—CH₂—NH—R₂, where R₁ and R₂ are amino acid residues or sequences. A reduced peptide bond may be introduced as a dipeptide subunit. Such a polypeptide would be resistant to protease activity, and would possess an extended half-live in vivo. Polypeptides can also include peptoids (N-substituted glycines), in which the side chains are appended to nitrogen atoms along the molecule's backbone, rather than to the α-carbons, as in amino acids. Polypeptides and peptides are intended to be used interchangeably throughout this application, i.e. where the term peptide is used, it may also include polypeptides and where the term polypeptides is used, it may also include peptides. The term “protein” is also intended to be used interchangeably throughout this application with the terms “polypeptides” and “peptides” unless otherwise specified.

[0271] A vesicle may be isolated, captured or detected using a binding agent. The binding agent can be an agent that binds a vesicle “housekeeping protein,” or general vesicle biomarker. The biomarker can be CD63, CD9, CD81, CD82, CD37, CD53, Rab-5b, Annexin V, MFG-E8 or other commonly observed vesicle markers include those listed in Table 3. Furthermore, any of the markers disclosed herein or in Table 3 can be selected in identifying a candidate biosignature for a disease or condition, where the one or more selected biomarkers have a direct or indirect role or function in mechanisms involved in the disease or condition.

[0272] The binding agent can also be an agent that binds to a vesicle derived from a specific cell type, such as a tumor cell (e.g. binding agent for Tissue factor, EpCam, B7H3, RAGE or CD24) or a specific cell-of-origin. The binding agent used to isolate or detect a vesicle can be a binding agent for an antigen selected from FIG. 1 of International Patent Publication No. WO/2011/127219, entitled “Circulating Biomarkers for Disease” and filed Apr. 6, 2011, which application is incorporated by reference in its entirety herein. The binding agent for a vesicle can also be selected from those listed in FIG. 2 of International Patent Publication No. WO/2011/127219. The binding agent can be for an antigen such as a tetraspanin, MFG-E8, Annexin V, 5T4, B7H3, caveolin, CD63, CD9, E-Cadherin, Tissue factor, MFG-E8, TMEM211, CD24, PSCA, PCSA, PSMA, Rab-5B, STEAP, TNFR1, CD81, EpCam, CD59, CD81, ICAM, EGFR, or CD66. A binding agent for a platelet can be a glycoprotein such as Gpla-IIa, GpIIb-IIIa, GpIIIb, GpIb, or GpIX. A binding agent can be for an antigen comprisine one or more of CD9, Erb2, Erb4, CD81, Erb3, MUC16, CD63, DLL4, HLA-Drpe, B7H3, IFNAR, 5T4, PCSA, MICB, PSMA, MFG-E8, Muc1, PSA, Muc2, Unc93a, VEGFR2, EpCAM, VEGF A, TMPRSS2, RAGE, PSCA, CD40, Muc17, IL-17-RA, and CD80. For example, the binding agent can be one or more of CD9, CD63, CD81, B7H3, PCSA, MFG-E8, MUC2, EpCam, RAGE and Muc17. One or more binding agents, such as one or more binding agents for two or more of the antigens, can be used for isolating or detecting a vesicle. The binding agent used can be selected based on the desire of isolating or detecting a vesicle derived from a particular cell type or cell-of-origin specific vesicle. The binding agent can be to one or more vesicle marker in Table 4.

[0273] A binding agent can also be linked directly or indirectly to a solid surface or substrate. A solid surface or substrate can be any physically separable solid to which a binding agent can be directly or indirectly attached including, but not limited to, surfaces provided by microarrays and wells, particles such as beads, columns, optical fibers, wipes, glass and modified or functionalized glass, quartz, mica, diazotized membranes (paper or nylon), polyformaldehyde, cellulose, cellulose acetate, paper, ceramics, metals, metalloids, semiconductive materials, quantum dots, coated beads or particles, other chromatographic materials, magnetic particles; plastics (including acrylics, polystyrene, copolymers of styrene or other materials, polypropylene, polyethylene, polybutylene, polyurethanes, polytetrafluoroethylene (PTFE, Teflon®), etc.), polysaccharides, nylon or nitrocellulose, resins, silica or silica-based materials including silicon and modified silicon, carbon, metals, inorganic glasses, plastics, ceramics, conducting polymers (including polymers such as polypyrole and polyindole); micro or nanostructured surfaces such as nucleic acid tiling arrays, nanotube, nanowire, or nanoparticulate decorated surfaces; or porous surfaces or gels such as methacrylates, acrylamides, sugar polymers, cellulose, silicates, or other fibrous or stranded polymers. In addition, as is known the art, the substrate may be coated using passive or chemically-derivatized coatings with any number of materials, including polymers, such as dextrans, acrylamides, gelatins or agarose. Such coatings can facilitate the use of the array with a biological sample.

[0274] For example, an antibody used to isolate a vesicle can be bound to a solid substrate such as a well, such as commercially available plates (e.g. from Nunc, Milan Italy). Each well can be coated with the antibody. In some embodiments, the antibody used to isolate a vesicle is bound to a solid substrate such as an array. The array can have a predetermined spatial arrangement of molecule interactions, binding islands, biomolecules, zones, domains or spatial arrangements of binding islands or binding agents deposited within discrete boundaries. Further, the term array may be used herein to refer to multiple arrays arranged on a surface, such as would be the case where a surface bore multiple copies of an array. Such surfaces bearing multiple arrays may also be referred to as multiple arrays or repeating arrays.

[0275] Arrays typically contain addressable moieties that can detect the presense of an entity, e.g., a vesicle in the sample via a binding event. An array may be referred to as a microarray. Arrays or microarrays include without limitation DNA microarrays, such as cDNA microarrays, oligonucleotide microarrays and SNP microarrays, microRNA arrays, protein microarrays, antibody microarrays, tissue microarrays, cellular microarrays (also called transfection microarrays), chemical compound microarrays, and carbohydrate arrays (glycoarrays). DNA arrays typically comprise addressable nucleotide sequences that can bind to sequences present in a sample. MicroRNA arrays, e.g., the MMChips array from the University of Louisville or commercial systems from Agilent, can be used to detect microRNAs. Protein microarrays can be used to identify protein-protein interactions, including without limitation identifying substrates of protein kinases, transcription factor protein-activation, or to identify the targets of biologically active small molecules. Protein arrays may comprise an array of different protein molecules, commonly antibodies, or nucleotide sequences that bind to proteins of interest. In a non-limiting example, a protein array can be used to detect vesicles having certain proteins on their surface. Antibody arrays comprise antibodies spotted onto the protein chip that are used as capture molecules to detect proteins or other biological materials from a sample, e.g., from cell or tissue lysate solutions. For example, antibody arrays can be used to detect vesicle-associated biomarkers from bodily fluids, e.g., serum or urine. Tissue microarrays comprise separate tissue cores assembled in array fashion to allow multiplex histological analysis. Cellular microarrays, also called transfection microarrays, comprise various capture agents, such as antibodies, proteins, or lipids, which can interact with cells to facilitate their capture on addressable locations. Cellular arrays can also be used to capture vesicles due to the similarity between a vesicle and cellular membrane. Chemical compound microarrays comprise arrays of chemical compounds and can be used to detect protein or other biological materials that bind the compounds. Carbohydrate arrays (glycoarrays) comprise arrays of carbohydrates and can detect, e.g., protein that bind sugar moieties. One of skill will appreciate that similar technologies or improvements can be used according to the methods of the invention.

[0276] A binding agent can also be bound to particles such as beads or microspheres. For example, an antibody specific for a component of a vesicle can be bound to a particle, and the antibody-bound particle is used to isolate a vesicle from a biological sample. In some embodiments, the microspheres may be magnetic or fluorescently labeled. In addition, a binding agent for isolating vesicles can be a solid substrate itself. For example, latex beads, such as aldehyde/sulfate beads (Interfacial Dynamics, Portland, Oreg.) can be used.

[0277] A binding agent bound to a magnetic bead can also be used to isolate a vesicle. For example, a biological sample such as serum from a patient can be collected for colon cancer screening. The sample can be incubated with anti-CCSA-3 (Colon Cancer-Specific Antigen) coupled to magnetic microbeads. A low-density microcolumn can be placed in the magnetic field of a MACS Separator and the column is then washed with a buffer solution such as Tris-buffered saline. The magnetic immune complexes can then be applied to the column and unbound, non-specific material can be discarded. The CCSA-3 selected vesicle can be recovered by removing the column from the separator and placing it on a collection tube. A buffer can be added to the column and the magnetically labeled vesicle can be released by applying the plunger supplied with the column. The isolated vesicle can be diluted in IgG elution buffer and the complex can then be centrifuged to separate the microbeads from the vesicle. The pelleted isolated cell-of-origin specific vesicle can be resuspended in buffer such as phosphate-buffered saline and quantitated. Alternatively, due to the strong adhesion force between the antibody captured cell-of-origin specific vesicle and the magnetic microbeads, a proteolytic enzyme such as trypsin can be used for the release of captured vesicles without the need for centrifugation. The proteolytic enzyme can be incubated with the antibody captured cell-of-origin specific vesicles for at least a time sufficient to release the vesicles.

[0278] A binding agent, such as an antibody, for isolating vesicles is preferably contacted with the biological sample comprising the vesicles of interest for at least a time sufficient for the binding agent to bind to a component of the vesicle. For example, an antibody may be contacted with a biological sample for various intervals ranging from seconds days, including but not limited to, about 10 minutes, 30 minutes, 1 hour, 3 hours, 5 hours, 7 hours, 10 hours, 15 hours, 1 day, 3 days, 7 days or 10 days.

[0279] A binding agent, such as an antibody specific to an antigen listed in FIG. 1 of International Patent Publication No. WO/2011/127219, entitled “Circulating Biomarkers for Disease” and filed Apr. 6, 2011, which application is incorporated by reference in its entirety herein, or a binding agent listed in FIG. 2 of International Patent Publication No. WO/2011/127219, can be labeled to facilitate detection. Appropriate labels include without limitation a magnetic label, a fluorescent moiety, an enzyme, a chemiluminescent probe, a metal particle, a non-metal colloidal particle, a polymeric dye particle, a pigment molecule, a pigment particle, an electrochemically active species, semiconductor nanocrystal or other nanoparticles including quantum dots or gold particles, fluorophores, quantum dots, or radioactive labels. Various protein, radioactive, fluorescent, enzymatic, and other labels are described further above.

[0280] A binding agent can be directly or indirectly labeled, e.g., the label is attached to the antibody through biotin-streptavidin. Alternatively, an antibody is not labeled, but is later contacted with a second antibody that is labeled after the first antibody is bound to an antigen of interest.

[0281] Depending on the method of isolation or detection used, the binding agent may be linked to a solid surface or substrate, such as arrays, particles, wells and other substrates described above. Methods for direct chemical coupling of antibodies, to the cell surface are known in the art, and may include, for example, coupling using glutaraldehyde or maleimide activated antibodies. Methods for chemical coupling using multiple step procedures include biotinylation, coupling of trinitrophenol (TNP) or digoxigenin using for example succinimide esters of these compounds. Biotinylation can be accomplished by, for example, the use of D-biotinyl-N-hydroxysuccinimide Succinimide groups react effectively with amino groups at pH values above 7, and preferentially between about pH 8.0 and about pH 8.5. Biotinylation can be accomplished by, for example, treating the cells with dithiothreitol followed by the addition of biotin maleimide.

[0282] Particle-Based Assays

[0283] As an alternative to planar arrays, assays using particles or microspheres, such as bead based assays, are capable of use with a binding agent. For example, antibodies or aptamers are easily conjugated with commercially available beads. See, e.g., Fan et al., Illumina universal bead arrays. Methods Enzymol. 2006 410:57-73; Srinivas et al. Anal. Chem. 2011 Oct. 21, Aptamer functionalized Microgel Particles for Protein Detection; See also, review article on aptamers as therapeutic and diagnostic agents, Brody and Gold, Rev. Mol. Biotech. 2000, 74:5-13.

[0284] Multiparametric assays or other high throughput detection assays using bead coatings with cognate ligands and reporter molecules with specific activities consistent with high sensitivity automation can be used. In a bead based assay system, a binding agent for a biomarker or vesicle, such as a capture agent (e.g. capture antibody), can be immobilized on an addressable microsphere. Each binding agent for each individual binding assay can be coupled to a distinct type of microsphere (i.e., microbead) and the assay reaction takes place on the surface of the microsphere, such as depicted in FIG. 2B. A binding agent for a vesicle can be a capture antibody or aptamer coupled to a bead. Dyed microspheres with discrete fluorescence intensities are loaded separately with their appropriate binding agent or capture probes. The different bead sets carrying different binding agents can be pooled as desired to generate custom bead arrays. Bead arrays are then incubated with the sample in a single reaction vessel to perform the assay.

[0285] Various particle/bead substrates and systems useful for the methods of the invention are described further above.

[0286] Flow Cytometry

[0287] In various embodiments of the invention, flow cytometry, which is described in further detail above, is used to assess a microvesicle population in a biological sample. If desired, the microvesicle population can be sorted from other particles (e.g., cell debris, protein aggregates, etc) in a sample by labeling the vesicles using one or more general vesicle marker. The general vesicle marker can be a marker in Table 3. Commonly used vesicle markers include tetraspanins such as CD9, CD63 and/or CD81. Vesicles comprising one or more tetraspanin are sometimes refered to as “Tet+” herein to indicate that the vesicles are tetraspanin-positive. The sorted microvesicles can be further assessed using methodology described herein. E.g., surface antigens on the sorted microvesicles can be detected using flow or other methods. In some embodiments, payload within the sorted microvesicles is assessed. As an illustrative example, a population of microvesicles is contacted with a labeled binding agent to a surface antigen of interest, the contacted microvesicles are sorted using flow cytometry, and payload with the microvesicles is assessed. The payload may be polypeptides, nucleic acids (e.g., mRNA or microRNA) or other biological entities as desired. Such assessment is used to characterize a phenotype as described herein, e.g., to diagnose, prognose or theranose a cancer.

[0288] In an embodiment, flow sorting is used to distinguish microvesicle populations from other biological complexes. In a non-limiting example, Ago2+/Tet+ and Ago2+/Tet− particles are detected using flow methodology to separate Ago2+ vesicles from vesicle-free Ago2+complexes, respectively.

[0289] Multiplexing

[0290] Multiplex experiments comprise experiments that can simultaneously measure multiple analytes in a single assay. Vesicles and associated biomarkers can be assessed in a multiplex fashion. Different binding agents can be used for multiplexing different circulating biomarkers, e.g., microRNA, protein, or vesicle populations. Different biomarkers, e.g., different vesicle populations, can be isolated or detected using different binding agents. Each population in a biological sample can be labeled with a different signaling label, such as a fluorophore, quantum dot, or radioactive label, such as described above. The label can be directly conjugated to a binding agent or indirectly used to detect a binding agent that binds a vesicle. The number of populations detected in a multiplexing assay is dependent on the resolution capability of the labels and the summation of signals, as more than two differentially labeled vesicle populations that bind two or more affinity elements can produce summed signals.

[0291] Multiplexing of at least 2, 3, 4, 5, 6, 7, 8, 9, 10, 11, 12, 13, 14, 15, 16, 17, 18, 19, 20, 25, 50, 75 or 100 different circulating biomarkers may be performed. For example, one population of vesicles specific to a cell-of-origin can be assayed along with a second population of vesicles specific to a different cell-of-origin, where each population is labeled with a different label. Alternatively, a population of vesicles with a particular biomarker or biosignature can be assayed along with a second population of vesicles with a different biomarker or biosignature. In some cases, hundreds or thousands of vesicles are assessed in a single assay.

[0292] In one embodiment, multiplex analysis is performed by applying a plurality of vesicles comprising more than one population of vesicles to a plurality of substrates, such as beads. Each bead is coupled to one or more capture agents. The plurality of beads is divided into subsets, where beads with the same capture agent or combination of capture agents form a subset of beads, such that each subset of beads has a different capture agent or combination of capture agents than another subset of beads. The beads can then be used to capture vesicles that comprise a component that binds to the capture agent. The different subsets can be used to capture different populations of vesicles. The captured vesicles can then be analyzed by detecting one or more biomarkers.

[0293] Flow cytometry can be used in combination with a particle-based or bead based assay. Multiparametric immunoassays or other high throughput detection assays using bead coatings with cognate ligands and reporter molecules with specific activities consistent with high sensitivity automation can be used. For example, beads in each subset can be differentially labeled from another subset. In a particle based assay system, a binding agent or capture agent for a vesicle, such as a capture antibody, can be immobilized on addressable beads or microspheres. Each binding agent for each individual binding assay (such as an immunoassay when the binding agent is an antibody) can be coupled to a distinct type of microsphere (i.e., microbead) and the binding assay reaction takes place on the surface of the microspheres. Microspheres can be distinguished by different labels, for example, a microsphere with a specific capture agent would have a different signaling label as compared to another microsphere with a different capture agent. For example, microspheres can be dyed with discrete fluorescence intensities such that the fluorescence intensity of a microsphere with a specific binding agent is different than that of another microsphere with a different binding agent. Biomarkers bound by different capture agents can be differentially detected using different labels.

[0294] A microsphere can be labeled or dyed with at least 2 different labels or dyes. In some embodiments, the microsphere is labeled with at least 3, 4, 5, 6, 7, 8, 9, or 10 different labels. Different microspheres in a plurality of microspheres can have more than one label or dye, wherein various subsets of the microspheres have various ratios and combinations of the labels or dyes permitting detection of different microspheres with different binding agents. For example, the various ratios and combinations of labels and dyes can permit different fluorescent intensities. Alternatively, the various ratios and combinations maybe used to generate different detection patters to identify the binding agent. The microspheres can be labeled or dyed externally or may have intrinsic fluorescence or signaling labels. Beads can be loaded separately with their appropriate binding agents and thus, different vesicle populations can be isolated based on the different binding agents on the differentially labeled microspheres to which the different binding agents are coupled.

[0295] In another embodiment, multiplex analysis can be performed using a planar substrate, wherein the substrate comprises a plurality of capture agents. The plurality of capture agents can capture one or more populations of vesicles, and one or more biomarkers of the captured vesicles detected. The planar substrate can be a microarray or other substrate as further described herein.

[0296] Binding Agents

[0297] A vesicle may be isolated or detected using a binding agent for a novel component of a vesicle, such as an antibody for a novel antigen specific to a vesicle of interest. Novel antigens that are specific to a vesicle of interest may be isolated or identified using different test compounds of known composition bound to a substrate, such as an array or a plurality of particles, which can allow a large amount of chemical/structural space to be adequately sampled using only a small fraction of the space. The novel antigen identified can also serve as a biomarker for the vesicle. For example, a novel antigen identified for a cell-of-origin specific vesicle can be a useful biomarker.

[0298] The term “agent” or “reagent” as used in respect to contacting a sample can mean any entity designed to bind, hybridize, associate with or otherwise detect or facilitate detection of a target molecule, including target polypeptides, peptides, nucleic acid molecules, leptins, lipids, or any other biological entity that can be detected as described herein or as known in the art. Examples of such agents/reagents are well known in the art, and include but are not limited to universal or specific nucleic acid primers, nucleic acid probes, antibodies, aptamers, peptoid, peptide nucleic acid, locked nucleic acid, lectin, dendrimer, chemical compound, or other entities described herein or known in the art.

[0299] A binding agent can be identified by screening either a homogeneous or heterogeneous vesicle population against test compounds. Since the composition of each test compound on the substrate surface is known, this constitutes a screen for affinity elements. For example, a test compound array comprises test compounds at specific locations on the substrate addressable locations, and can be used to identify one or more binding agents for a vesicle. The test compounds can all be unrelated or related based on minor variations of a core sequence or structure. The different test compounds may include variants of a given test compound (such as polypeptide isoforms), test compounds that are structurally or compositionally unrelated, or a combination thereof.

[0300] A test compound can be a peptoid, polysaccharide, organic compound, inorganic compound, polymer, lipids, nucleic acid, polypeptide, antibody, protein, polysaccharide, or other compound. The test compound can be natural or synthetic. The test compound can comprise or consist of linear or branched heteropolymeric compounds based on any of a number of linkages or combinations of linkages (e.g., amide, ester, ether, thiol, radical additions, metal coordination, etc.), dendritic structures, circular structures, cavity structures or other structures with multiple nearby sites of attachment that serve as scaffolds upon which specific additions are made. Thes test compound can be spotted on a substrate or synthesized in situ, using standard methods in the art. In addition, the test compound can be spotted or synthesized in situ in combinations in order to detect useful interactions, such as cooperative binding.

[0301] The test compound can be a polypeptide with known amino acid sequence, thus, detection of a test compound binding with a vesicle can lead to identification of a polypeptide of known amino sequence that can be used as a binding agent. For example, a homogenous population of vesicles can be applied to a spotted array on a slide containing between a few and 1,000,000 test polypeptides having a length of variable amino acids. The polypeptides can be attached to the surface through the C-terminus. The sequence of the polypeptides can be generated randomly from 19 amino acids, excluding cysteine. The binding reaction can include a non-specific competitor, such as excess bacterial proteins labeled with another dye such that the specificity ratio for each polypeptide binding target can be determined. The polypeptides with the highest specificity and binding can be selected. The identity of the polypeptide on each spot is known, and thus can be readily identified. Once the novel antigens specific to the homogeneous vesicle population, such as a cell-of-origin specific vesicle is identified, such cell-of-origin specific vesicles may subsequently be isolated using such antigens in methods described hereafter.

[0302] An array can also be used for identifying an antibody as a binding agent for a vesicle. Test antibodies can be attached to an array and screened against a heterogeneous population of vesicles to identify antibodies that can be used to isolate or identify a vesicle. A homogeneous population of vesicles such as cell-of-origin specific vesicles can also be screened with an antibody array. Other than identifying antibodies to isolate or detect a homogeneous population of vesicles, one or more protein biomarkers specific to the homogenous population can be identified. Commercially available platforms with test antibodies pre-selected or custom selection of test antibodies attached to the array can be used. For example, an antibody array from Full Moon Biosystems can be screened using prostate cancer cell derived vesicles identifying antibodies to Bcl-XL, ERCC1, Keratin 15, CD81/TAPA-1, CD9, Epithelial Specific Antigen (ESA), and Mast Cell Chymase as binding agents, and the proteins identified can be used as biomarkers for the vesicles. The biomarker can be present or absent, underexpressed or overexpressed, mutated, or modified in or on a vesicle and used in characterizing a condition.

[0303] An antibody or synthetic antibody to be used as a binding agent can also be identified through a peptide array. Another method is the use of synthetic antibody generation through antibody phage display. M13 bacteriophage libraries of antibodies (e.g. Fabs) are displayed on the surfaces of phage particles as fusions to a coat protein. Each phage particle displays a unique antibody and also encapsulates a vector that contains the encoding DNA. Highly diverse libraries can be constructed and represented as phage pools, which can be used in antibody selection for binding to immobilized antigens. Antigen-binding phages are retained by the immobilized antigen, and the nonbinding phages are removed by washing. The retained phage pool can be amplified by infection of an Escherichia coli host and the amplified pool can be used for additional rounds of selection to eventually obtain a population that is dominated by antigen-binding clones. At this stage, individual phase clones can be isolated and subjected to DNA sequencing to decode the sequences of the displayed antibodies. Through the use of phase display and other methods known in the art, high affinity designer antibodies for vesicles can be generated.

[0304] Bead-based assays can also be used to identify novel binding agents to isolate or detect a vesicle. A test antibody or peptide can be conjugated to a particle. For example, a bead can be conjugated to an antibody or peptide and used to detect and quantify the proteins expressed on the surface of a population of vesicles in order to discover and specifically select for novel antibodies that can target vesicles from specific tissue or tumor types. Any molecule of organic origin can be successfully conjugated to a polystyrene bead through use of a commercially available kit according to manufacturer's instructions. Each bead set can be colored a certain detectable wavelength and each can be linked to a known antibody or peptide which can be used to specifically measure which beads are linked to exosomal proteins matching the epitope of previously conjugated antibodies or peptides. The beads can be dyed with discrete fluorescence intensities such that each bead with a different intensity has a different binding agent as described above.

[0305] For example, a purified vesicle preparation can be diluted in assay buffer to an appropriate concentration according to empirically determined dynamic range of assay. A sufficient volume of coupled beads can be prepared and approximately 1 μl of the antibody-coupled beads can be aliqouted into a well and adjusted to a final volume of approximately 50 μl. Once the antibody-conjugated beads have been added to a vacuum compatible plate, the beads can be washed to ensure proper binding conditions. An appropriate volume of vesicle preparation can then be added to each well being tested and the mixture incubated, such as for 15-18 hours. A sufficient volume of detection antibodies using detection antibody diluent solution can be prepared and incubated with the mixture for 1 hour or more. The beads can then be washed before the addition of detection antibody (biotin expressing) mixture composed of streptavidin phycoereythin. The beads can then be washed and vacuum aspirated several times before analysis on a suspension array system using software provided with an instrument. The identity of antigens that can be used to selectively extract the vesicles can then be elucidated from the analysis.

[0306] Assays using imaging systems can be used to detect and quantify proteins expressed on the surface of a vesicle in order to discover and specifically select for and enrich vesicles from specific tissue, cell or tumor types. Antibodies, peptides or cells conjugated to multiple well multiplex carbon coated plates can be used. Simultaneous measurement of many analytes in a well can be achieved through the use of capture antibodies arrayed on the patterned carbon working surface. Analytes can then be detected with antibodies labeled with reagents in electrode wells with an enhanced electro-chemiluminescent plate. Any molecule of organic origin can be successfully conjugated to the carbon coated plate. Proteins expressed on the surface of vesicles can be identified from this assay and can be used as targets to specifically select for and enrich vesicles from specific tissue or tumor types.

[0307] The binding agent can also be an aptamer to a specific target. The term “specific” as used herein in regards to a binding agent can mean that an agent has a greater affinity for its target than other targets, typically with a much great affinity, but does not require that the binding agent is absolutely specific for its target.

[0308] Microfluidics

[0309] The methods for isolating or identifying vesicles can be used in combination with microfluidic devices. The methods of isolating or detecting a vesicle, such as described herien, can be performed using a microfluidic device. Microfluidic devices, which may also be referred to as “lab-on-a-chip” systems, biomedical micro-electro-mechanical systems (bioMEMs), or multicomponent integrated systems, can be used for isolating and analyzing a vesicle. Such systems miniaturize and compartmentalize processes that allow for binding of vesicles, detection of biosignatures, and other processes.

[0310] A microfluidic device can also be used for isolation of a vesicle through size differential or affinity selection. For example, a microfluidic device can use one more channels for isolating a vesicle from a biological sample based on size or by using one or more binding agents for isolating a vesicle from a biological sample. A biological sample can be introduced into one or more microfluidic channels, which selectively allows the passage of a vesicle. The selection can be based on a property of the vesicle, such as the size, shape, deformability, or biosignature of the vesicle.

[0311] In one embodiment, a heterogeneous population of vesicles can be introduced into a microfluidic device, and one or more different homogeneous populations of vesicles can be obtained. For example, different channels can have different size selections or binding agents to select for different vesicle populations. Thus, a microfluidic device can isolate a plurality of vesicles wherein at least a subset of the plurality of vesicles comprises a different biosignature from another subset of the plurality of vesicles. For example, the microfluidic device can isolate at least 2, 3, 4, 5, 6, 7, 8, 9, 10, 15, 20, 25, 30, 40, 50, 60, 70, 80, 90, or 100 different subsets of vesicles, wherein each subset of vesicles comprises a different biosignature.

[0312] In some embodiments, the microfluidic device can comprise one or more channels that permit further enrichment or selection of a vesicle. A population of vesicles that has been enriched after passage through a first channel can be introduced into a second channel, which allows the passage of the desired vesicle or vesicle population to be further enriched, such as through one or more binding agents present in the second channel.

[0313] Array-based assays and bead-based assays can be used with microfluidic device. For example, the binding agent can be coupled to beads and the binding reaction between the beads and vesicle can be performed in a microfluidic device. Multiplexing can also be performed using a microfluidic device. Different compartments can comprise different binding agents for different populations of vesicles, where each population is of a different cell-of-origin specific vesicle population. In one embodiment, each population has a different biosignature. The hybridization reaction between the microsphere and vesicle can be performed in a microfluidic device and the reaction mixture can be delivered to a detection device. The detection device, such as a dual or multiple laser detection system can be part of the microfluidic system and can use a laser to identify each bead or microsphere by its color-coding, and another laser can detect the hybridization signal associated with each bead.

[0314] Various microfluidic devices and methods are described above.

[0315] Combined Isolation Methodology

[0316] One of skill will appreciate that various methods of sample treatment and isolating and concentrating circulating biomarkers such as vesicles can be combined as desired. For example, a biological sample can be treated to prevent aggregation, remove undesired particulate and/or deplete highly abundant proteins. The steps used can be chosen to optimize downstream analysis steps. Next, biomarkers such as vesicles can be isolated, e.g., by chromotography, centrifugation, density gradient, filtration, precipitation, or affinity techniques. Any number of the later steps can be combined, e.g., a sample could be subjected to one or more of chromotography, centrifugation, density gradient, filtration and precipitation in order to isolate or concentrate all or most microvesicles. In a subsequent step, affinity techniques, e.g., using binding agents to one or more target of interest, can be used to isolate or identify microvesicles carrying desired biomarker profiles. Microfluidic systems can be employed to perform some or all of these steps.

[0317] An exemplary yet non-limiting isolation scheme for isolating and analysis of microvesicles includes the following: Plasma or serum collection→highly abundant protein removal→ultrafiltration→nanomembrane concentration→flow cytometry or particle-based assay.

[0318] Using the methods disclosed herein or known in the art, circulating biomarkers such as vesicles can be isolated or concentrated by at least about 2-fold, 3-fold, 1-fold, 2-fold, 3-fold, 4-fold, 5-fold, 6-fold, 7-fold, 8-fold, 9-fold, 10-fold, 12-fold, 15-fold, 20-fold, 25-fold, 30-fold, 35-fold, 40-fold, 45-fold, 50-fold, 55-fold, 60-fold, 65-fold, 70-fold, 75-fold, 80-fold, 90-fold, 95-fold, 100-fold, 110-fold, 120-fold, 125-fold, 130-fold, 140-fold, 150-fold, 160-fold, 170-fold, 175-fold, 180-fold, 190-fold, 200-fold, 225-fold, 250-fold, 275-fold, 300-fold, 325-fold, 350-fold, 375-fold, 400-fold, 425-fold, 450-fold, 475-fold, 500-fold, 525-fold, 550-fold, 575-fold, 600-fold, 625-fold, 650-fold, 675-fold, 700-fold, 725-fold, 750-fold, 775-fold, 800-fold, 825-fold, 850-fold, 875-fold, 900-fold, 925-fold, 950-fold, 975-fold, 1000-fold, 1500-fold, 2000-fold, 2500-fold, 3000-fold, 4000-fold, 5000-fold, 6000-fold, 7000-fold, 8000-fold, 9000-fold, or at least 10,000-fold. In some embodiments, the vesicles are isolated or concentrated concentrated by at least 1 order of magnitude, 2 orders of magnitude, 3 orders of magnitude, 4 orders of magnitude, 5 orders of magnitude, 6 orders of magnitude, 7 orders of magnitude, 8 orders of magnitude, 9 orders of magnitude, or 10 orders of magnitude or more.

[0319] Once concentrated or isolated, the circulating biomarkers can be assessed, e.g., in order to characterize a phenotype as described herein. In some embodiments, the concentration or isolation steps themselves shed light on the phenotype of interest. For example, affinity methods can detect the presence or level of specific biomarkers of interest.

[0320] The various isolation and detection systems described herein can be used to isolate or detect circulating biomarkers such as vesicles that are informative for diagnosis, prognosis, disease stratification, theranosis, prediction of responder/non-responder status, disease monitoring, treatment monitoring and the like as related to such diseases and disorders. Combinations of the isolation techniques are within the scope of the invention. In a non-limiting example, a sample can be run through a chromatography column to isolate vesicles based on a property such as size of electrophoretic motility, and the vesicles can then be passed through a microfluidic device. Binding agents can be used before, during or after these steps.

[0321] The methods and compositions of the invention can be used with microvesicles isolated or detected using such methods as described herein. In various non-limiting examples: an aptamer provided by the methods of the invention can be used as a capture and/or detector agent for a biomarker such as a protein or microvesicle; a sample such as a bodily fluid can be contacted with an oligonucleotide probe library of the invention before microvesicles in the sample are isolated using one or more technique described herein (e.g., chromatography, centrifugation, flow cytometry, filtration, affinity isolation, polymer precipitation, etc); microvesicles in a sample are isolated using one or more technique described herein (e.g., chromatography, centrifugation, flow cytometry, filtration, affinity isolation, polymer precipitation, etc) before contacting the microvesicles with an aptamer or oligonucleotide probe library of the invention. Contaminants such as highly abundant proteins can be removed in whole or in part at any appropriate step in such processes. These and various other useful iterations of such techniques for assessment of microvesicles and other biomarkers are contemplated by the invention.

### Biomarkers

[0322] As described herein, the methods and compositions of the invention can be used in assays to detect the presence or level of one or more biomarker of interest. The biomarker can be any useful biomarker disclosed herein or known to those of skill in the art. In an embodiment, the biomarker comprises a protein or polypeptide. As used herein, “protein,” “polypeptide” and “peptide” are used interchangeably unless stated otherwise. The biomarker can be a nucleic acid, including DNA, RNA, and various subspecies of any thereof as disclosed herein or known in the art. The biomarker can comprise a lipid. The biomarker can comprise a carbohydrate. The biomarker can also be a complex, e.g., a complex comprising protein, nucleic acids, lipids and/or carbohydrates. In some embodiments, the biomarker comprises a microvesicle. In an embodiment, the invention provides a method wherein a pool of aptamers is used to assess the presence and/or level of a population of microvesicles of interest without knowing the precise microvesicle antigen targeted by each member of the pool. See, e.g., FIGS. 19B-C. In other cases, biomarkers associated with microvesicles are assessed according to the methods of the invention. See, e.g., FIGS. 2A-2F; FIG. 19A.

[0323] A biosignature comprising more than one biomarker can comprise one type of biomarker or multiple types of biomarkers. As a non-limiting example, a biosignature can comprise multiple proteins, multiple nucleic acids, multiple lipids, multiple carbohydrates, multiple biomarker complexes, multiple microvesicles, or a combination of any thereof. For example, the biosignature may comprise one or more microvesicle, one or more protein, and one or more microRNA, wherein the one or more protein and/or one or more microRNA is optionally in association with the microvesicle as a surface antigen and/or payload, as appropriate.

[0324] In some embodiments, vesicles are detected using vesicle surface antigens. A commonly expressed vesicle surface antigen can be referred to as a “housekeeping protein,” or general vesicle biomarker. The biomarker can be CD63, CD9, CD81, CD82, CD37, CD53, Rab-5b, Annexin V or MFG-E8. Tetraspanins, a family of membrane proteins with four transmembrane domains, can be used as general vesicle biomarkers. The tetraspanins include CD151, CD53, CD37, CD82, CD81, CD9 and CD63. There have been over 30 tetraspanins identified in mammals, including the TSPAN1 (TSP-1), TSPAN2 (TSP-2), TSPAN3 (TSP-3), TSPAN4 (TSP-4, NAG-2), TSPAN5 (TSP-5), TSPAN6 (TSP-6), TSPAN7 (CD231, TALLA-1, A15), TSPAN8 (CO-029), TSPAN9 (NET-5), TSPAN10 (Oculospanin), TSPAN11 (CD151-like), TSPAN12 (NET-2), TSPAN13 (NET-6), TSPAN14, TSPAN15 (NET-7), TSPAN16 (TM4-B), TSPAN17, TSPAN18, TSPAN19, TSPAN20 (UP1b, UPK1B), TSPAN21 (UPla, UPK1A), TSPAN22 (RDS, PRPH2), TSPAN23 (ROM1), TSPAN24 (CD151), TSPAN25 (CD53), TSPAN26 (CD37), TSPAN27 (CD82), TSPAN28 (CD81), TSPAN29 (CD9), TSPAN30 (CD63), TSPAN31 (SAS), TSPAN32 (TSSC6), TSPAN33, and TSPAN34. Other commonly observed vesicle markers include those listed in Table 3. One or more of these proteins can be useful biomarkers for the characterizing a phenotype using the subject methods and compositions.

TABLE 3
Proteins Observed in Vesicles from Multiple Cell Types

| Class | Protein |
|---|---|
| Antigen Presentation | MHC class I, MHC class II, Integrins, Alpha 4 beta 1, Alpha M beta 2, |
| | Beta 2 |
| Immunoglobulin family | ICAM1/CD54, P-selection |
| Cell-surface peptidases | Dipeptidylpeptidase IV/CD26, Aminopeptidase n/CD13 |
| Tetraspanins | CD151, CD53, CD37, CD82, CD81, CD9 and CD63 |
| Heat-shock proteins | Hsp70, Hsp84/90 |
| Cytoskeletal proteins | Actin, Actin-binding proteins, Tubulin |
| Membrane transport | Annexin I, Annexin II, Annexin IV, Annexin V, Annexin VI, |
| and fusion | RAB7/RAP1B/RADGDI |
| Signal transduction | Gi2alpha/14-3-3, CBL/LCK |
| Abundant membrane | CD63, GAPDH, CD9, CD81, ANXA2, ENO1, SDCBP, MSN, MFGE8, |
| proteins | EZR, GK, ANXA1, LAMP2, DPP4, TSG101, HSPA1A, GDI2, CLTC, |
| | LAMP1, Cd86, ANPEP, TFRC, SLC3A2, RDX, RAP1B, RAB5C, |
| | RAB5B, MYH9, ICAM1, FN1, RAB11B, PIGR, LGALS3, ITGB1, |
| | EHD1, CLIC1, ATP1A1, ARF1, RAP1A, P4HB, MUC1, KRT10, HLA- |
| | A, FLOT1, CD59, C1orf58, BASP1, TACSTD1, STOM |
| Other Transmembrane | Cadherins: CDH1, CDH2, CDH12, CDH3, Deomoglein, DSG1, DSG2, |
| Proteins | DSG3, DSG4, Desmocollin, DSC1, DSC2, DSC3, Protocadherins, |
| | PCDH1, PCDH10, PCDH11x, PCDH11y, PCDH12, FAT, FAT2, FAT4, |
| | PCDH15, PCDH17, PCDH18, PCDH19; PCDH20; PCDH7, PCDH8, |
| | PCDH9, PCDHA1, PCDHA10, PCDHA11, PCDHA12, PCDHA13, |
| | PCDHA2, PCDHA3, PCDHA4, PCDHA5, PCDHA6, PCDHA7, |
| | PCDHA8, PCDHA9, PCDHAC1, PCDHAC2, PCDHB1, PCDHB10, |
| | PCDHB11, PCDHB12, PCDHB13, PCDHB14, PCDHB15, PCDHB16, |
| | PCDHB17, PCDHB18, PCDHB2, PCDHB3, PCDHB4, PCDHB5, |
| | PCDHB6, PCDHB7, PCDHB8, PCDHB9, PCDHGA1, PCDHGA10, |
| | PCDHGA11, PCDHGA12, PCDHGA2; PCDHGA3, PCDHGA4, |
| | PCDHGA5, PCDHGA6, PCDHGA7, PCDHGA8, PCDHGA9, |
| | PCDHGB1, PCDHGB2, PCDHGB3, PCDHGB4, PCDHGB5, |
| | PCDHGB6, PCDHGB7, PCDHGC3, PCDHGC4, PCDHGC5, CDH9 |
| | (cadherin 9, type 2 (T1-cadherin)), CDH10 (cadherin 10, type 2 (T2- |
| | cadherin)), CDH5 (VE-cadherin (vascular endothelial)), CDH6 (K- |
| | cadherin (kidney)), CDH7 (cadherin 7, type 2), CDH8 (cadherin 8, type |
| | 2), CDH11 (OB-cadherin (osteoblast)), CDH13 (T-cadherin - H-cadherin |
| | (heart)), CDH15 (M-cadherin (myotubule)), CDH16 (KSP-cadherin), |
| | CDH17 (LI cadherin (liver-intestine)), CDH18 (cadherin 18, type 2), |
| | CDH19 (cadherin 19, type 2), CDH20 (cadherin 20, type 2), CDH23 |
| | (cadherin 23, (neurosensory epithelium)), CDH10, CDH11, CDH13, |
| | CDH15, CDH16, CDH17, CDH18, CDH19, CDH20, CDH22, CDH23, |
| | CDH24, CDH26, CDH28, CDH4, CDH5, CDH6, CDH7, CDH8, CDH9, |
| | CELSR1, CELSR2, CELSR3, CLSTN1, CLSTN2, CLSTN3, DCHS1, |
| | DCHS2, LOC389118, PCLKC, RESDA1, RET |

[0325] Any of the types of biomarkers described herein can be used and/or assessed via the subject methods and compositions. Exemplary biomarkers include without limitation those in Table 4. The markers can be detected as protein, RNA or DNA as appropriate, which can be circulating freely or in a complex with other biological molecules. As appropriate, the markers in Table 4 can also be used for capture and/or detection of vesicles for characterizing phenotypes as disclosed herein. In some cases, multiple capture and/or detectors are used to enhance the characterization. See, e.g., FIGS. 2D-E. The markers can be detected as vesicle surface antigens and/or vesicle payload. The “Illustrative Class” indicates indications for which the markers are known markers. Those of skill will appreciate that the markers can also be used in alternate settings in certain instances. For example, a marker which can be used to characterize one type disease may also be used to characterize another disease as appropriate. Consider a non-limiting example of a tumor marker which can be used as a biomarker for tumors from various lineages. The biomarker references in Tables 3 and 4 are those commonly used in the art. Gene aliases and descriptions can be found using a variety of online databases, including GeneCards® (www.genecards.org), HUGO Gene Nomenclature (www.genenames.org), Entrez Gene (www.ncbi.nlm.nih.gov/entrez/query.fcgi?db=gene), UniProtKB/Swiss-Prot (www.uniprot.org), UniProtKB/TrEMBL (www.uniprot.org), OMIM (www.ncbi.nlm.nih.gov/entrez/query.fcgi?db=OMIM), GeneLoc (genecards.weizmann.acil/geneloc/), and Ensembl (www.ensembl.org). Generally, gene symbols and names below correspond to those approved by HUGO, and protein names are those recommended by UniProtKB/Swiss-Prot. Common alternatives are provided as well. In some cases, biomarkers are referred to by Ensembl reference numbers, which are of the form “ENSG” followed by a number, e.g., ENSG00000005893 which corresponds to LAMP2. In Table 4, solely for sake of brevity, “E.” is sometimes used to represent “ENSG00000”. For example, “E.005893 represents “ENSG00000005893.” Where a protein name indicates a precursor, the mature protein is also implied. Throughout the application, gene and protein symbols may be used interchangeably and the meaning can be derived from context as necessary.

TABLE 4
Illustrative Biomarkers

| Illustrative Class | Biomarkers |
|---|---|
| Drug associated | ABCC1, ABCG2, ACE2, ADA, ADH1C, ADH4, AGT, AR, AREG, ASNS, BCL2, BCRP, |
| targets and | BDCA1, beta III tubulin, BIRC5, B-RAF, BRCA1, BRCA2, CA2, caveolin, CD20, CD25, |
| prognostic markers | CD33, CD52, CDA, CDKN2A, CDKN1A, CDKN1B, CDK2, CDW52, CES2, CK 14, CK |
| | 17, CK 5/6, c-KIT, c-Met, c-Myc, COX-2, Cyclin Dl, DCK, DHFR, DNMT1, DNMT3A, |
| | DNMT3B, E-Cadherin, ECGF1, EGFR, EML4-ALK fusion, EPHA2, Epiregulin, ER, |
| | ERBR2, ERCC1, ERCC3, EREG, ESR1, FLT1, folate receptor, FOLR1, FOLR2, FSHB, |
| | FSHPRH1, FSHR, FYN, GART, GNA11, GNAQ, GNRH1, GNRHR1, GSTP1, HCK, |
| | HDAC1, hENT-1, Her2/Neu, HGF, HIF1A, HIG1, HSP90, HSP90AA1, HSPCA, IGF-1R, |
| | IGFRBP, IGFRBP3, IGFRBP4, IGFRBP5, IL13RA1, IL2RA, KDR, Ki67, KIT, K-RAS, |
| | LCK, LTB, Lymphotoxin Beta Receptor, LYN, MET, MGMT, MLH1, MMR, MRP1, |
| | MS4A1, MSH2, MSH5, Myc, NFKB1, NFKB2, NFKBIA, NRAS, ODC1, OGFR, p16, p21, |
| | p27, p53, p95, PARP-1, PDGFC, PDGFR, PDGFRA, PDGFRB, PGP, PGR, PI3K, POLA, |
| | POLA1, PPARG, PPARGC1, PR, PTEN, PTGS2, PTPN12, RAF1, RARA, ROS1, RRM1, |
| | RRM2, RRM2B, RXRB, RXRG, SIK2, SPARC, SRC, SSTR1, SSTR2, SSTR3, SSTR4, |
| | SSTR5, Survivin, TK1, TLE3, TNF, TOP1, TOP2A, TOP2B, TS, TUBB3, TXN, TXNRD1, |
| | TYMS, VDR, VEGF, VEGFA, VEGFC, VHL, YES1, ZAP70 |
| Drug associated | ABL1, STK11, FGFR2, ERBB4, SMARCB1, CDKN2A, CTNNB1, FGFR1, FLT3, |
| targets and | NOTCH1, NPM1, SRC, SMAD4, FBXW7, PTEN, TP53, AKT1, ALK, APC, CDH1, C-Met, |
| prognostic markers | HRAS, IDH1, JAK2, MPL, PDGFRA, SMO, VHL, ATM, CSF1R, FGFR3, GNAS, ERBB2, |
| | HNF1A, JAK3, KDR, MLH1, PTPN11, RB1, RET, c-Kit, EGFR, PIK3CA, NRAS, GNA11, |
| | GNAQ, KRAS, BRAF |
| Drug associated | ALK, AR, BRAF, cKIT, cMET, EGFR, ER, ERCC1, GNA11, HER2, IDH1, KRAS, MGMT, |
| targets and | MGMT promoter methylation, NRAS, PDGFRA, Pgp, PIK3CA, PR, PTEN, ROS1, RRM1, |
| prognostic markers | SPARC, TLE3, TOP2A, TOPO1, TS, TUBB3, VHL |
| Drug associated | ABL1, AKT1, ALK, APC, AR, ATM, BRAF, BRAF, BRCA1, BRCA2, CDH1, cKIT, |
| targets | cMET, CSF1R, CTNNB1, EGFR, EGFR (H-score), EGFRvIII, ER, ERBB2 (HER2), |
| | ERBB4, ERCC1, FBXW7, FGFR1, FGFR2, FLT3, GNA11, GNAQ, GNAS, HER2, |
| | HNF1A, HRAS, IDH1, IDH2, JAK2, JAK3, KDR (VEGFR2), KRAS, MGMT, MGMT |
| | Promoter Methylation, microsatellite instability (MSI), MLH1, MPL, MSH2, MSH6, |
| | NOTCH1, NPM1, NRAS, PD-1, PDGFRA, PD-L1, Pgp, PIK3CA, PMS2, PR, PTEN, |
| | PTPN11, RB1, RET, ROS1, RRM1, SMAD4, SMARCB1, SMO, SPARC, STK11, TLE3, |
| | TOP2A, TOPO1, TP53, TS, TUBB3, VHL |
| Drug associated | 1p19q co-deletion, ABL1, AKT1, ALK, APC, AR, ARAF, ATM, BAP1, BRAF, BRCA1, |
| targets | BRCA2, CDH1, CHEK1, CHEK2, cKIT, cMET, CSF1R, CTNNB1, DDR2, EGFR, |
| | EGFRvIII, ER, ERBB2 (HER2), ERBB3, ERBB4, ERCC1, FBXW7, FGFR1, FGFR2, FLT3, |
| | GNA11, GNAQ, GNAS, H3K36me3, HER2, HNF1A, HRAS, IDH1, IDH2, JAK2, JAK3, |
| | KDR (VEGFR2), KRAS, MDMT, MGMT, MGMT Methylation, Microsatellite instability, |
| | MLH1, MPL, MSH2, MSH6, NF1, NOTCH1, NPM1, NRAS, NY-ESO-1, PD-1, PDGFRA, |
| | PD-L1, Pgp, PIK3CA, PMS2, PR, PTEN, PTPN11, RAF1, RB1, RET, ROS1, ROS1, RRM1, |
| | SMAD4, SMARCB1, SMO, SPARC, STK11, TLE3, TOP2A, TOPO1, TP53, TRKA, TS, |
| | TUBB3, VHL, WT1 |
| Drug associated | ABL1, AKT1, ALK, APC, AR, ATM, BRAF, BRAF, BRCA1, BRCA2, CDH1, cKIT, |
| targets | cMET, CSF1R, CTNNB1, EGFR, EGFR (H-score), EGFRvIII, ER, ERBB2 (HER2), |
| | ERBB4, ERCC1, FBXW7, FGFR1, FGFR2, FLT3, GNA11, GNAQ, GNAS, HER2, |
| | HNF1A, HRAS, IDH1, IDH2, JAK2, JAK3, KDR (VEGFR2), KRAS, MGMT, MGMT |
| | Promoter Methylation, microsatellite instability (MSI), MLH1, MPL, MSH2, MSH6, |
| | NOTCH1, NPM1, NRAS, PD-1, PDGFRA, PD-L1, Pgp, PIK3CA, PMS2, PR, PTEN, |
| | PTPN11, RB1, RET, ROS1, RRM1, SMAD4, SMARCB1, SMO, SPARC, STK11, TLE3, |
| | TOP2A, TOPO1, TP53, TS, TUBB3, VHL |
| Drug associated | 1p19q, ALK, ALK (2p23), Androgen Receptor, BRCA, cMET, EGFR, EGFR, EGFRvIII, |
| targets | ER, ERCC1, Her2, Her2/Neu, MGMT, MGMT Promoter Methylation, microsatellite |
| | instability (MSI), MLH1, MSH2, MSH6, PD-1, PD-L1, PMS2, PR, PTEN, ROS1, RRM1, |
| | TLE3, TOP2A, TOP2A, TOPO1, TS, TUBB3 |
| Drug associated | TOP2A, Chromosome 17 alteration, PBRM1 (PB1/BAF180), BAP1, SETD2 (ANTI- |
| targets | HISTONE H3), MDM2, Chromosome 12 alteration, ALK, CTLA4, CD3, NY-ESO-1, |
| | MAGE-A, TP, EGFR |
| 5-aminosalicyclic | μ-protocadherin, KLF4, CEBPα |
| acid (5-ASA) | |
| efficacy | |
| Cancer treatment | AR, AREG (Amphiregulin), BRAF, BRCA1, cKIT, cMET, EGFR, EGFR w/T790M, EML4- |
| associated markers | ALK, ER, ERBB3, ERBB4, ERCC1, EREG, GNA11, GNAQ, hENT-1, Her2, Her2 Exon 20 |
| | insert, IGF1R, Ki67, KRAS, MGMT, MGMT methylation, MSH2, MSI, NRAS, PGP |
| | (MDR1), PIK3CA, PR, PTEN, ROS1, ROS1 translocation, RRM1, SPARC, TLE3, TOPO1, |
| | TOPO2A, TS, TUBB3, VEGFR2 |
| Cancer treatment | AR, AREG, BRAF, BRCA1, cKIT, cMET, EGFR, EGFR w/T790M, EML4-ALK, ER, |
| associated markers | ERBB3, ERBB4, ERCC1, EREG, GNA11, GNAQ, Her2, Her2 Exon 20 insert, IGFR1, Ki67, |
| | KRAS, MGMT-Me, MSH2, MSI, NRAS, PGP (MDR-1), PIK3CA, PR, PTEN, ROS1 |
| | translocation, RRM1, SPARC, TLE3, TOPO1, TOPO2A, TS, TUBB3, VEGFR2 |
| Colon cancer | AREG, BRAF, EGFR, EML4-ALK, ERCC1, EREG, KRAS, MSI, NRAS, PIK3CA, PTEN, |
| treatment | TS, VEGFR2 |
| associated markers | |
| Colon cancer | AREG, BRAF, EGFR, EML4-ALK, ERCC1, EREG, KRAS, MSI, NRAS, PIK3CA, PTEN, |
| treatment | TS, VEGFR2 |
| associated markers | |
| Melanoma | BRAF, cKIT, ERBB3, ERBB4, ERCC1, GNA11, GNAQ, MGMT, MGMT methylation, |
| treatment | NRAS, PIK3CA, TUBB3, VEGFR2 |
| associated markers | |
| Melanoma | BRAF, cKIT, ERBB3, ERBB4, ERCC1, GNA11, GNAQ, MGMT-Me, NRAS, PIK3CA, |
| treatment | TUBB3, VEGFR2 |
| associated markers | |
| Ovarian cancer | BRCA1, cMET, EML4-ALK, ER, ERBB3, ERCC1, hENT-1, HER2, IGF1R, PGP(MDRl), |
| treatment | PIK3CA, PR, PTEN, RRM1, TLE3, TOPO1, TOPO2A, TS |
| associated markers | |
| Ovarian cancer | BRCA1, cMET, EML4-ALK (translocation), ER, ERBB3, ERCC1, HER2, PIK3CA, PR, |
| treatment | PTEN, RRM1, TLE3, TS |
| associated markers | |
| Breast cancer | BRAF, BRCA1, EGFR, EGFR T790M, EML4-ALK, ER, ERBB3, ERCC1, HER2, Ki67, |
| treatment | PGP (MDR1), PIK3CA, PR, PTEN, ROS1, ROS1 translocation, RRM1, TLE3, TOPO1, |
| associated markers | TOPO2A, TS |
| Breast cancer | BRAF, BRCA1, EGFR w/T790M, EML4-ALK, ER, ERBB3, ERCC1, HER2, Ki67, KRAS, |
| treatment | PIK3CA, PR, PTEN, ROS1 translocation, RRM1, TLE3, TOPO1, TOPO2A, TS |
| associated markers | |
| NSCLC cancer | BRAF, BRCA1, cMET, EGFR, EGFR w/T790M, EML4-ALK, ERCC1, Her2 Exon 20 |
| treatment | insert, KRAS, MSH2, PIK3CA, PTEN, ROS1 (trans), RRM1, TLE3, TS, VEGFR2 |
| associated markers | |
| NSCLC cancer | BRAF, cMET, EGFR, EGFR w/T790M, EML4-ALK, ERCC1, Her2 Exon 20 insert, KRAS, |
| treatment | MSH2, PIK3CA, PTEN, ROS1 translocation, RRM1, TLE3, TS |
| associated markers | |
| Mutated in cancers | AKT1, ALK, APC, ATM, BRAF, CDH1, CDKN2A, c-Kit, C-Met, CSF1R, CTNNB1, |
| | EGFR, ERBB2, ERBB4, FBXW7, FGFR1, FGFR2, FGFR3, FLT3, GNA11, GNAQ, GNAS, |
| | HNF1A, HRAS, IDH1, JAK2, JAK3, KDR, KRAS, MLH1, MPL, NOTCH1, NPM1, NRAS, |
| | PDGFRA, PIK3CA, PTEN, PTPN11, RB1, RET, SMAD4, SMARCB1, SMO, SRC, STK11, |
| | TP53, VHL |
| Mutated in cancers | ALK, BRAF, BRCA1, BRCA2, EGFR, ERRB2, GNA11, GNAQ, IDH1, IDH2, KIT, KRAS, |
| | MET, NRAS, PDGFRA, PIK3CA, PTEN, RET, SRC, TP53 |
| Mutated in cancers | AKT1, HRAS, GNAS, MEK1, MEK2, ERK1, ERK2, ERBB3, CDKN2A, PDGFRB, IFG1R, |
| | FGFR1, FGFR2, FGFR3, ERBB4, SMO, DDR2, GRB1, PTCH, SHH, PD1, UGT1A1, BIM, |
| | ESR1, MLL, AR, CDK4, SMAD4 |
| Mutated in cancers | ABL, APC, ATM, CDH1, CSFR1, CTNNB1, FBXW7, FLT3, HNF1A, JAK2, JAK3, KDR, |
| | MLH1, MPL, NOTCH1, NPM1, PTPN11, RBI, SMARCB1, STK11, VHL |
| Mutated in cancers | ABL1, AKT1, AKT2, AKT3, ALK, APC, AR, ARAF, ARFRP1, ARID1A, ARID2, ASXL1, |
| | ATM, ATR, ATRX, AURKA, AURKB, AXL, BAP1, BARD1, BCL2, BCL2L2, BCL6, |
| | BCOR, BCORL1, BLM, BRAF, BRCA1, BRCA2, BRIP1, BTK, CARD11, CBFB, CBL, |
| | CCND1, CCND2, CCND3, CCNE1, CD79A, CD79B, CDC73, CDH1, CDK12, CDK4, |
| | CDK6, CDK8, CDKN1B, CDKN2A, CDKN2B, CDKN2C, CEBPA, CHEK1, CHEK2, CIC, |
| | CREBBP, CRKL, CRLF2, CSF1R, CTCF, CTNNA1, CTNNB1, DAXX, DDR2, DNMT3A, |
| | DOT1L, EGFR, EMSY (C11orf30), EP300, EPHA3, EPHA5, EPHB1, ERBB2, ERBB3, |
| | ERBB4, ERG, ESR1, EZH2, FAM123B (WTX), FAM46C, FANCA, FANCC, FANCD2, |
| | FANCE, FANCF, FANCG, FANCL, FBXW7, FGF10, FGF14, FGF19, FGF23, FGF3, |
| | FGF4, FGF6, FGFR1, FGFR2, FGFR3, FGFR4, FLT1, FLT3, FLT4, FOXL2, GATA1, |
| | GATA2, GATA3, GID4 (C17orf39), GNA11, GNA13, GNAQ, GNAS, GPR124, GRIN2A, |
| | GSK3B, HGF, HRAS, IDH1, IDH2, IGF1R, IKBKE, IKZF1, IL7R, INHBA, IRF4, IRS2, |
| | JAK1, JAK2, JAK3, JUN, KAT6A (MYST3), KDM5A, KDM5C, KDM6A, KDR, KEAP1, |
| | KIT, KLHL6, KRAS, LRP1B, MAP2K1, MAP2K2, MAP2K4, MAP3K1, MCL1, MDM2, |
| | MDM4, MED12, MEF2B, MEN1, MET, MITF, MLH1, MLL, MLL2, MPL, MRE11A, |
| | MSH2, MSH6, MTOR, MUTYH, MYC, MYCL1, MYCN, MYD88, NF1, NF2, NFE2L2, |
| | NFKBIA, NKX2-1, NOTCH1, NOTCH2, NPM1, NRAS, NTRK1, NTRK2, NTRK3, |
| | NUP93, PAK3, PALB2, PAX5, PBRM1, PDGFRA, PDGFRB, PDK1, PIK3CA, PIK3CG, |
| | PIK3R1, PIK3R2, PPP2R1A, PRDM1, PRKAR1A, PRKDC, PTCH1, PTEN, PTPN11, |
| | RAD50, RAD51, RAF1, RARA, RB1, RET, RICTOR, RNF43, RPTOR, RUNX1, SETD2, |
| | SF3B1, SMAD2, SMAD4, SMARCA4, SMARCB1, SMO, SOCS1, SOX10, SOX2, SPEN, |
| | SPOP, SRC, STAG2, STAT4, STK11, SUFU, TET2, TGFBR2, TNFAIP3, TNFRSF14, |
| | TOP1, TP53, TSC1, TSC2, TSHR, VHL, WISP3, WT1, XPO1, ZNF217, ZNF703 |
| Gene rearrangement in | ALK, BCR, BCL2, BRAF, EGFR, ETV1, ETV4, ETV5, ETV6, EWSR1, MLL, MYC, |
| cancer | NTRK1, PDGFRA, RAF1, RARA, RET, ROS1, TMPRSS2 |
| Cancer Related | ABL1, ACE2, ADA, ADH1C, ADH4, AGT, AKT1, AKT2, AKT3, ALK, APC, AR, ARAF, |
| | AREG, ARFRP1, ARID1A, ARID2, ASNS, ASXL1, ATM, ATR, ATRX, AURKA, |
| | AURKB, AXL, BAP1, BARD1, BCL2, BCL2L2, BCL6, BCOR, BCORL1, BCR, BIRC5 |
| | (survivin), BLM, BRAF, BRCA1, BRCA2, BRIP1, BTK, CA2, CARD11, CAV, CBFB, |
| | CBL, CCND1, CCND2, CCND3, CCNE1, CD33, CD52 (CDW52), CD79A, CD79B, |
| | CDC73, CDH1, CDK12, CDK2, CDK4, CDK6, CDK8, CDKN1B, CDKN2A, CDKN2B, |
| | CDKN2C, CEBPA, CES2, CHEK1, CHEK2, CIC, CREBBP, CRKL, CRLF2, CSF1R, |
| | CTCF, CTNNA1, CTNNB1, DAXX, DCK, DDR2, DHFR, DNMT1, DNMT3A, DNMT3B, |
| | DOT1L, EGFR, EMSY (C11orf30), EP300, EPHA2, EPHA3, EPHA5, EPHB1, ERBB2, |
| | ERBB3, ERBB4, ERBR2 (typo?), ERCC3, EREG, ERG, ESR1, ETV1, ETV4, ETV5, ETV6, |
| | EWSR1, EZH2, FAM123B (WTX), FAM46C, FANCA, FANCC, FANCD2, FANCE, |
| | FANCF, FANCG, FANCL, FBXW7, FGF10, FGF14, FGF19, FGF23, FGF3, FGF4, FGF6, |
| | FGFR1, FGFR2, FGFR3, FGFR4, FLT1, FLT3, FLT4, FOLR1, FOLR2, FOXL2, FSHB, |
| | FSHPRH1, FSHR, GART, GATA1, GATA2, GATA3, GID4 (C17orf39), GNA11, GNA13, |
| | GNAQ, GNAS, GNRH1, GNRHR1, GPR124, GRIN2A, GSK3B, GSTP1, HDAC1, HGF, |
| | HIG1, HNF1A, HRAS, HSPCA (HSP90), IDH1, IDH2, IGF1R, IKBKE, IKZF1, IL13RA1, |
| | IL2, IL2RA (CD25), IL7R, INHBA, IRF4, IRS2, JAK1, JAK2, JAK3, JUN, KAT6A |
| | (MYST3), KDM5A, KDM5C, KDM6A, KDR (VEGFR2), KEAP1, KIT, KLHL6, KRAS, |
| | LCK, LRP1B, LTB, LTBR, MAP2K1, MAP2K2, MAP2K4, MAP3K1, MAPK, MCL1, |
| | MDM2, MDM4, MED12, MEF2B, MEN1, MET, MGMT, MITF, MLH1, MLL, MLL2, |
| | MPL, MRE11A, MS4A1 (CD20), MSH2, MSH6, MTAP, MTOR, MUTYH, MYC, MYCL1, |
| | MYCN, MYD88, NF1, NF2, NFE2L2, NFKB1, NFKB2, NFKBIA, NGF, NKX2-1, |
| | NOTCH1, NOTCH2, NPM1, NRAS, NTRK1, NTRK2, NTRK3, NUP93, ODC1, OGFR, |
| | PAK3, PALB2, PAX5, PBRM1, PDGFC, PDGFRA, PDGFRB, PDK1, PGP, PGR (PR), |
| | PIK3CA, PIK3CG, PIK3R1, PIK3R2, POLA, PPARG, PPARGC1, PPP2R1A, PRDM1, |
| | PRKAR1A, PRKDC, PTCH1, PTEN, PTPN11, RAD50, RAD51, RAF1, RARA, RB1, RET, |
| | RICTOR, RNF43, ROS1, RPTOR, RRM1, RRM2, RRM2B, RUNX1, RXR, RXRB, RXRG, |
| | SETD2, SF3B1, SMAD2, SMAD4, SMARCA4, SMARCB1, SMO, SOCS1, SOX10, SOX2, |
| | SPARC, SPEN, SPOP, SRC, SST, SSTR1, SSTR2, SSTR3, SSTR4, SSTR5, STAG2, |
| | STAT4, STK11, SUFU, TET2, TGFBR2, TK1, TLE3, TMPRSS2, TNF, TNFAIP3, |
| | TNFRSF14, TOP1, TOP2, TOP2A, TOP2B, TP53, TS, TSC1, TSC2, TSHR, TUBB3, TXN, |
| | TYMP, VDR, VEGF (VEGFA), VEGFC, VHL, WISP3, WT1, XDH, XPO1, YES1, ZAP70, |
| | ZNF217, ZNF703 |
| Cancer Related | 5T4, ABI1, ABL1, ABL2, ACKR3, ACSL3, ACSL6, ACVR1B, ACVR2A, AFF1, AFF3, |
| | AFF4, AKAP9, AKT1, AKT2, AKT3, ALDH2, ALK, AMER1, ANG1/ANGPT1/TM7SF2, |
| | ANG2/ANGPT2/VPS51, APC, AR, ARAF, ARFRP1, ARHGAP26, ARHGEF12, ARID1A, |
| | ARID1B, ARID2, ARNT, ASPSCR1, ASXL1, ATF1, ATIC, ATM, ATP1A1, ATP2B3, |
| | ATR, ATRX, AURKA, AURKB, AXIN1, AXL, BAP1, BARD1, BBC3, BCL10, BCL11A, |
| | BCL11B, BCL2, BCL2L1, BCL2L11, BCL2L2, BCL3, BCL6, BCL7A, BCL9, BCOR, |
| | BCORL1, BCR, BIRC3, BLM, BMPR1A, BRAF, BRCA1, BRCA2, BRD3, BRD4, BRIP1, |
| | BTG1, BTK, BUB1B, c-KIT, C11orf30, c15orf21, C15orf65, C2orf44, CA6, CACNA1D, |
| | CALR, CAMTA1, CANT1, CARD11, CARS, CASC5, CASP8, CBFA2T3, CBFB, CBL, |
| | CBLB, CBLC, CCDC6, CCNB1IP1, CCND1, CCND2, CCND3, CCNE1, CD110, CD123, |
| | CD137, CD19, CD22, CD274, CD27L, CD38, CD4, CD74, CD79A, CD79B, CDC73, |
| | CDH1, CDH11, CDK12, CDK4, CDK6, CDK7, CDK8, CDK9, CDKN1A, CDKN1B, |
| | CDKN2A, CDKN2B, CDKN2C, CDX2, CEBPA, CHCHD7, CHD2, CHD4, CHEK1, |
| | CHEK2, CHIC2, Chk1, CHN1, CIC, CIITA, CLP1, CLTC, CLTCL1, CNBP, CNOT3, |
| | CNTRL, COL1A1, COPB1, CoREST, COX6C, CRAF, CREB1, CREB3L1, CREB3L2, |
| | CREBBP, CRKL, CRLF2, CRTC1, CRTC3, CSF1R, CSF3R, CTCF, CTLA4, CTNNA1, |
| | CTNNB1, CUL3, CXCR4, CYLD, CYP17A1, CYP2D6, DAXX, DDB2, DDIT3, DDR1, |
| | DDR2, DDX10, DDX5, DDX6, DEK, DICER1, DLL-4, DNAPK, DNM2, DNMT3A, |
| | DOT1L, EBF1, ECT2L, EGFR, EIF4A2, ELF4, ELK4, ELL, ELN, EML4, EP300, EPHA3, |
| | EPHA5, EPHA7, EPHA8, EPHB1, EPHB2, EPS15, ERBB2, ERBB3, ERBB4, ERC1, |
| | ERCC1, ERCC2, ERCC3, ERCC4, ERCC5, ERG, ERRFI1, ESR1, ETBR, ETV1, ETV4, |
| | ETV5, ETV6, EWSR1, EXT1, EXT2, EZH2, EZR, FAK, FAM46C, FANCA, FANCC, |
| | FANCD2, FANCE, FANCF, FANCG, FANCL, FAS, FAT1, FBXO11, FBXW7, FCRL4, |
| | FEV, FGF10, FGF14, FGF19, FGF2, FGF23, FGF3, FGF4, FGF6, FGFR1, FGFR1OP, |
| | FGFR2, FGFR3, FGFR4, FH, FHIT, FIP1L1, FKBP12, FLCN, FLI1, FLT1, FLT3, FLT4, |
| | FNBP1, FOXA1, FOXL2, FOXO1, FOXO3, FOXO4, FOXP1, FRS2, FSTL3, FUBP1, FUS, |
| | GABRA6, GAS7, GATA1, GATA2, GATA3, GATA4, GATA6, GID4, GITR, GUI1, GMPS, |
| | GNA11, GNA13, GNAQ, GNAS, GNRH1, GOLGA5, GOPC, GPC3, GPHN, GPR124, |
| | GRIN2A, GRM3, GSK3B, GUCY2C, H3F3A, H3F3B, HCK, HERPUD1, HEY1, HGF, |
| | HIP1, HIST1H3B, HIST1H4I, HLF, HMGA1, HMGA2, HMT, HNF1A, HNRNPA2B1, |
| | HOOK3, HOXA11, HOXA13, HOXA9, HOXC11, HOXC13, HOXD11, HOXD13, HRAS, |
| | HSD3B1, HSP90AA1, HSP90AB1, IAP, IDH1, IDH2, IGF1R, IGF2, IKBKE, IKZF1, IL2, |
| | IL21R, IL6, IL6ST, IL7R, INHBA, INPP4B, IRF2, IRF4, IRS2, ITGAV, ITGB1, ITK, JAK1, |
| | JAK2, JAK3, JAZF1, JUN, KAT6A, KAT6B, KCNJ5, KDM5A, KDM5C, KDM6A, KDR, |
| | KDSR, KEAP1, KEL, KIAA1549, KIF5B, KIR3DL1, KLF4, KLHL6, KLK2, KMT2A, |
| | KMT2C, KMT2D, KRAS, KTN1, LASP1, LCK, LCP1, LGALS3, LGR5, LHFP, LIFR, |
| | LMO1, LMO2, LOXL2, LPP, LRIG3, LRP1B, LSD1, LYL1, LYN, LZTR1, MAF, MAFB, |
| | MAGI2, MALT1, MAML2, MAP2K1, MAP2K2, MAP2K4, MAP3K1, MAPK1, MAPK11, |
| | MAX, MCL1, MDM2, MDM4, MDS2, MECOM, MED12, MEF2B, MEK1, MEK2, MEN1, |
| | MET, MITF, MKL1, MLF1, MLH1, MLLT1, MLLT10, MLLT11, MLLT3, MLLT4, |
| | MLLT6, MMP9, MN1, MNX1, MPL, MPS1, MRE11A, MS4A1, MSH2, MSH6, MSI2, |
| | MSN, MST1R, MTCP1, MTOR, MUC1, MUC16, MUTYH, MYB, MYC, MYCL, MYCN, |
| | MYD88, MYH11, MYH9, NACA, NAE1, NBN, NCKIPSD, NCOA1, NCOA2, NCOA4, |
| | NDRG1, NF1, NF2, NFE2L2, NFIB, NFKB2, NFKBIA, NIN, NKX2-1, NONO, NOTCH1, |
| | NOTCH2, NOTCH3, NPM1, NR4A3, NRAS, NSD1, NT5C2, NTRK1, NTRK2, NTRK3, |
| | NUMA1, NUP214, NUP93, NUP98, NUTM1, NUTM2B, OLIG2, OMD, P2RY8, |
| | PAFAH1B2, PAK3, PALB2, PARK2, PARP1, PATZ1, PAX3, PAX5, PAX7, PAX8, |
| | PBRM1, PBX1, PCM1, PCSK7, PDCD1, PDCD1LG2, PDE4DIP, PDGFB, PDGFRA, |
| | PDGFRB, PDK1, PER1, PHF6, PHOX2B, PICALM, PIK3C2B, PIK3CA, PIK3CB, |
| | PIK3CD, PIK3CG, PIK3R1, PIK3R2, PIM1, PKC, PLAG1, PLCG2, PML, PMS1, PMS2, |
| | POLD1, POLE, POT1, POU2AF1, POU5F1, PPARG, PPP2R1A, PRCC, PRDM1, PRDM16, |
| | PREX2, PRF1, PRKAR1A, PRKCI, PRKDC, PRLR, PRRX1, PRSS8, PSIP1, PTCH1, |
| | PTEN, PTK2, PTPN11, PTPRC, PTPRD, QKI, RABEP1, RAC1, RAD21, RAD50, RAD51, |
| | RAD51B, RAF1, RALGDS, RANBP17, RANBP2, RANKL, RAP1GDS1, RARA, RB1, |
| | RBM10, RBM15, RECQL4, REL, RET, RHOH, RICTOR, RMI2, RNF213, RNF43, ROS1, |
| | RPL10, RPL22, RPL5, RPN1, RPS6KB1, RPTOR, RUNX1, RUNx1T1, SBDS, SDC4, |
| | SDHA, SDHAF2, SDHB, SDHC, SDHD, SEPT5, SEPT6, SEPT9, SET, SETBP1, SETD2, |
| | SF3B1, SFPQ, SH2B3, SH3GL1, SLAMF7, SLC34A2, SLC45A3, SLIT2, SMAD2, |
| | SMAD3, SMAD4, SMARCA4, SMARCB1, SMARCE1, SMO, SNCAIP, SNX29, SOCS1, |
| | SOX10, SOX2, SOX9, SPECC1, SPEN, SPOP, SPTA1, SRC, SRGAP3, SRSF2, SRSF3, |
| | SS18, SS18L1, SSX1, SSX2, SSX4, STAG2, STAT3, STAT4, STAT5B, STEAP1, STIL, |
| | STK11, SUFU, SUZ12, SYK, TAF1, TAF15, TAL1, TAL2, TBL1XR1, TBX3, TCEA1, |
| | TCF12, TCF3, TCF7L2, TCL1A, TERC, TERT, TET1, TET2, TFE3, TFEB, TFG, TFPT, |
| | TFRC, TGFB1, TGFBR2, THRAP3, TIE2, TLX1, TLX3, TMPRSS2, TNFAIP3, |
| | TNFRSF14, TNFRSF17, TOPI, TOP2A, TP53, TPM3, TPM4, TPR, TRAF7, TRIM26, |
| | TRIM27, TRIM33, TRIP11, TRRAP, TSC1, TSC2, TSHR, TTL, U2AF1, UBA1, UBR5, |
| | USP6, VEGFA, VEGFB, VEGFR, VHL, VTI1A, WAS, WEE1, WHSC1, WHSC1L1, WIF1, |
| | WISP3, WNT11, WNT2B, WNT3, WNT3A, WNT4, WNT5A, WNT6, WNT7B, WRN, |
| | WT1, WWTR1, XPA, XPC, XPO1, YWHAE, ZAK, ZBTB16, ZBTB2, ZMYM2, ZNF217, |
| | ZNF331, ZNF384, ZNF521, ZNF703, ZRSR2 |
| Cancer Related | ABL2, ACSL3, ACSL6, AFF1, AFF3, AFF4, AKAP9, AKT3, ALDH2, APC, ARFRP1, |
| | ARHGAP26, ARHGEF12, ARID2, ARNT, ASPSCR1, ASXL1, ATF1, ATIC, ATM, |
| | ATP1A1, ATR, AURKA, AXIN1, AXL, BAP1, BARD1, BCL10, BCL11A, BCL2L11, |
| | BCL3, BCL6, BCL7A, BCL9, BCR, BIRC3, BLM, BMPR1A, BRAF, BRCA1, BRCA2, |
| | BRIP1, BUB1B, C11orf30, C2orf44, CACNA1D, CALR, CAMTA1, CANT1, CARD11, |
| | CARS, CASC5, CASP8, CBFA2T3, CBFB, CBL, CBLB, CCDC6, CCNB1IP1, CCND2, |
| | CD274, CD74, CD79A, CDC73, CDH11, CDKN1B, CDX2, CHEK1, CHEK2, CHIC2, |
| | CHN1, CIC, CIITA, CLP1, CLTC, CLTCL1, CNBP, CNTRL, COPB1, CREB1, CREB3L1, |
| | CREB3L2, CRTC1, CRTC3, CSF1R, CSF3R, CTCF, CTLA4, CTNNA1, CTNNB1, CYLD, |
| | CYP2D6, DAXX, DDR2, DDX10, DDX5, DDX6, DEK, DICER1, DOT1L, EBF1, ECT2L, |
| | ELK4, ELL, EML4, EPHA3, EPHA5, EPHB1, EPS15, ERBB3, ERBB4, ERC1, ERCC2, |
| | ERCC3, ERCC4, ERCC5, ERG, ESR1, ETV1, ETV5, ETV6, EWSR1, EXT1, EXT2, EZR, |
| | FANCA, FANCC, FANCD2, FANCE, FANCG, FANCL, FAS, FBXO11, FBXW7, FCRL4, |
| | FGF14, FGF19, FGF23, FGF6, FGFR1OP, FGFR4, FH, FHIT, FIP1L1, FLCN, FLU, FLT1, |
| | FLT3, FLT4, FNBP1, FOXA1, FOXO1, FOXP1, FUBP1, FUS, GAS7, GID4, GMPS, |
| | GNA13, GNAQ, GNAS, GOLGA5, GOPC, GPHN, GPR124, GRIN2A, GSK3B, H3F3A, |
| | H3F3B, HERPUD1, HGF, HIP1, HMGA1, HMGA2, HNRNPA2B1, HOOK3, HSP90AA1, |
| | HSP90AB1, IDH1, IDH2, IGF1R, IKZF1, IL2, IL21R, IL6ST, IL7R, IRF4, ITK, JAK1, |
| | JAK2, JAK3, JAZF1, KDM5A, KEAP1, KIAA1549, KIF5B, KIT, KLHL6, KMT2A, |
| | KMT2C, KMT2D, KRAS, KTN1, LCK, LCP1, LGR5, LHFP, LIFR, LPP, LRIG3, LRP1B, |
| | LYL1, MAF, MALT1, MAML2, MAP2K2, MAP2K4, MAP3K1, MDM4, MDS2, MEF2B, |
| | MEN1, MITF, MLF1, MLH1, MLLT1, MLLT10, MLLT3, MLLT4, MLLT6, MNX1, |
| | MRE11A, MSH2, MSH6, MSI2, MTOR, MYB, MYCN, MYD88, MYH11, MYH9, NACA, |
| | NCKIPSD, NCOA1, NCOA2, NCOA4, NF1, NFE2L2, NFIB, NFKB2, NIN, NOTCH2, |
| | NPM1, NR4A3, NSD1, NT5C2, NTRK2, NTRK3, NUP214, NUP93, NUP98, NUTM1, |
| | PALB2, PAX3, PAX5, PAX7, PBRM1, PBX1, PCM1, PCSK7, PDCD1, PDCD1LG2, |
| | PDGFB, PDGFRA, PDGFRB, PDK1, PER1, PICALM, PIK3CA, PIK3R1, PIK3R2, PIM1, |
| | PML, PMS2, POLE, POT1, POU2AF1, PPARG, PRCC, PRDM1, PRDM16, PRKAR1A, |
| | PRRX1, PSIP1, PTCH1, PTEN, PTPN11, PTPRC, RABEP1, RAC1, RAD50, RAD51, |
| | RAD51B, RAF1, RALGDS, RANBP17, RAP1GDS1, RARA, RBM15, REL, RET, RMI2, |
| | RNF43, RPL22, RPL5, RPN1, RPTOR, RUNX1, RUNX1T1, SBDS, SDC4, SDHAF2, |
| | SDHB, SDHC, SDHD, 8-Sep, SET, SETBP1, SETD2, SF3B1, SH2B3, SH3GL1, SLC34A2, |
| | SMAD2, SMAD4, SMARCB1, SMARCE1, SMO, SNX29, SOX10, SPECC1, SPEN, |
| | SRGAP3, SRSF2, SRSF3, SS18, SS18L1, STAT3, STAT4, STAT5B, STIL, STK11, SUFU, |
| | SUZ12, SYK, TAF15, TCF12, TCF3, TCF7L2, TET1, TET2, TFEB, TFG, TFRC, TGFBR2, |
| | TLX1, TNFAIP3, TNFRSF14, TNFRSF17, TP53, TPM3, TPM4, TPR, TRAF7, TRIM26, |
| | TRIM27, TRIM33, TRIP11, TRRAP, TSC1, TSC2, TSHR, TTL, U2AF1, USP6, VEGFA, |
| | VEGFB, VTI1A, WHSC1, WHSC1L1, WIF1, WISP3, WRN, WWTR1, XPA, XPC, XPO1, |
| | YWHAE, ZMYM2, ZNF217, ZNF331, ZNF384, ZNF521, ZNF703 |
| Gene fusions and | AKT3, ALK, ARHGAP26, AXL, BRAF, BRD3/4, EGFR, ERG, ESR1, ETV1/4/5/6, |
| mutations in cancer | EWSR1, FGFR1, FGFR2, FGFR3, FGR, INSR, MAML2, MAST1/2, MET, MSMB, MUSK, |
| | MYB, NOTCH1/2, NRG1, NTRK1/2/3, NUMBL, NUTM1, PDGFRA/B, PIK3CA, PKN1, |
| | PPARG, PRKCA/B, RAF1, RELA, RET, ROS1, RSPO2/3, TERT, TFE3, TFEB, THADA, |
| | TMPRSS2 |
| Gene fusions and | ABL1 fusion to (ETV6, NUP214, RCSD1, RANBP2, SNX2, or ZMIZ1); ABL2 fusion to |
| mutations in cancer | (PAG1 or RCSD1); CSF1R fusion to (SSBP2); PDGFRB fusion to (EBF1, SSBP2, |
| | TNIP1 or ZEB2); CRLF2 fusion to (P2RY8); JAK2 fusion to (ATF7IP, BCR, ETV6, |
| | PAX5, PPFIBP1, SSBP2, STRN3, TERP2, or TPR); EPOR fusion to (IGH or IGK); |
| | IL2RB fusion to (MYH9); NTRK3 fusion to (ETV6); PTK2B fusion to (KDM6A or |
| | STAG2); TSLP fusion to (IQGAP2); TYK2 fusion to (MYB) |
| Cytohesions | cytohesin-1 (CYTH1), cytohesin-2 (CYTH2; ARNO), cytohesin-3 (CYTH3; Grp1; ARNO3), |
| | cytohesin-4 (CYTH4) |
| Cancer/Angio | Erb 2, Erb 3, Erb 4, UNC93a, B7H3, MUC1, MUC2, MUC16, MUC17, 5T4, RAGE, VEGF |
| | A, VEGFR2, FLT1, DLL4, Epcam |
| Tissue (Breast) | BIG H3, GCDFP-15, PR(B), GPR 30, CYFRA 21, BRCA 1, BRCA 2, ESR 1, ESR2 |
| Tissue (Prostate) | PSMA, PCSA, PSCA, PSA, TMPRSS2 |
| Inflammation/Immune | MFG-E8, IFNAR, CD40, CD80, MICB, HLA-DRb, IL-17-Ra |
| Common vesicle | HSPA8, CD63, Actb, GAPDH, CD9, CD81, ANXA2, HSP90AA1, ENO1, YWHAZ, |
| markers | PDCD6IP, CFL1, SDCBP, PKN2, MSN, MFGE8, EZR, YWHAG, PGK1, EEF1A1, PPIA, |
| | GLC1F, GK, ANXA6, ANXA1, ALDOA, ACTG1, TPI1, LAMP2, HSP90AB1, DPP4, |
| | YWHAB, TSG101, PFN1, LDHB, HSPA1B, HSPA1A, GSTP1, GNAI2, GDI2, CLTC, |
| | ANXA5, YWHAQ, TUBA1A, THBS1, PRDX1, LDHA, LAMP1, CLU, CD86 |
| Common vesicle | CD63, GAPDH, CD9, CD81, ANXA2, ENO1, SDCBP, MSN, MFGE8, EZR, GK, ANXA1, |
| membrane markers | LAMP2, DPP4, TSG101, HSPA1A, GDI2, CLTC, LAMP1, CD86, ANPEP, TFRC, |
| | SLC3A2, RDX, RAP1B, RAB5C, RAB5B, MYH9, ICAM1, FN1, RAB11B, PIGR, |
| | LGALS3, ITGB1, EHD1, CLIC1, ATP1A1, ARF1, RAP1A, P4HB, MUC1, KRT10, HLA- |
| | A, FLOT1, CD59, C1orf58, BASP1, TACSTD1, STOM |
| Common vesicle | MHC class I, MHC class II, Integrins, Alpha 4 beta 1, Alpha M beta 2, Beta 2, |
| markers | ICAM1/CD54, P-selection, Dipeptidylpeptidase IV/CD26, Aminopeptidase n/CD13, CD151, |
| | CD53, CD37, CD82, CD81, CD9, CD63, Hsp70, Hsp84/90 |
| | Actin, Actin-binding proteins, Tubulin, Annexin I, Annexin II, Annexin IV, Annexin V, |
| | Annexin VI, RAB7/RAP1B/RADGDI, Gi2alpha/14-3-3, CBL/LCK, CD63, GAPDH, CD9, |
| | CD81, ANXA2, ENO1, SDCBP, MSN, MFGE8, EZR, GK, ANXA1, LAMP2, DPP4, |
| | TSG101, HSPA1A, GDI2, CLTC, LAMP1, Cd86, ANPEP, TFRC, SLC3A2, RDX, RAP1B, |
| | RAB5C, RAB5B, MYH9, ICAM1, FN1, RAB11B, PIGR, LGALS3, ITGB1, EHD1, CLIC1, |
| | ATP1A1, ARF1, RAP1A, P4HB, MUC1, KRT10, HLA-A, FLOT1, CD59, C1orf58, BASP1, |
| | TACSTD1, STOM |
| Vesicle markers | A33, a33 n15, AFP, ALA, ALIX, ALP, AnnexinV, APC, ASCA, ASPH (246-260), ASPH |
| | (666-680), ASPH (A-10), ASPH (D01P), ASPH (D03), ASPH (G-20), ASPH (H-300), |
| | AURKA, AURKB, B7H3, B7H4, BCA-225, BCNP, BDNF, BRCA, CA125 (MUC16), CA- |
| | 19-9, C-Bir, CD1.1, CD10, CD174 (Lewis y), CD24, CD44, CD46, CD59 (MEM-43), CD63, |
| | CD66e CEA, CD73, CD81, CD9, CDA, CDAC1 1a2, CEA, C-Erb2, C-erbB2, CRMP-2, |
| | CRP, CXCL12, CYFRA21-1, DLL4, DR3, EGFR, Epcam, EphA2, EphA2 (H-77), ER, |
| | ErbB4, EZH2, FASL, FRT, FRT c.f23, GDF15, GPCR, GPR30, Gro-alpha, HAP, HBD 1, |
| | HBD2, HER 3 (ErbB3), HSP, HSP70, hVEGFR2, iC3b, IL 6 Unc, IL-1B, IL6 Unc, IL6R, |
| | IL8, IL-8, INSIG-2, KLK2, L1CAM, LAMN, LDH, MACC-1, MAPK4, MART-1, MCP-1, |
| | M-CSF, MFG-E8, MIC1, MIF, MIS RII, MMG, MMP26, MMP7, MMP9, MS4A1, MUC1, |
| | MUC1 seq1, MUC1 seq11A, MUC17, MUC2, Ncam, NGAL, NPGP/NPFF2, OPG, OPN, |
| | p53, p53, PA2G4, PBP, PCSA, PDGFRB, PGP9.5, PIM1, PR (B), PRL, PSA, PSMA, |
| | PSME3, PTEN, R5-CD9 Tube 1, Reg IV, RUNX2, SCRN1, seprase, SERPINB3, SPARC, |
| | SPB, SPDEF, SRVN, STAT 3, STEAP1, TF (FL-295), TFF3, TGM2, TIMP-1, TIMP1, |
| | TIMP2, TMEM211, TMPRSS2, TNF-alpha, Trail-R2, Trail-R4, TrKB, TROP2, Tsg 101, |
| | TWEAK, UNC93A, VEGF A, YPSMA-1 |
| Vesicle markers | NSE, TRIM29, CD63, CD151, ASPH, LAMP2, TSPAN1, SNAIL, CD45, CKS1, NSE, |
| | FSHR, OPN, FTH1, PGP9, ANNEXIN 1, SPD, CD81, EPCAM, PTH1R, CEA, CYTO 7, |
| | CCL2, SPA, KRAS, TWIST1, AURKB, MMP9, P27, MMP1, HLA, HIF, CEACAM, |
| | CENPH, BTUB, INTG b4, EGFR, NACC1, CYTO 18, NAP2, CYTO 19, ANNEXIN V, |
| | TGM2, ERB2, BRCA1, B7H3, SFTPC, PNT, NCAM, MS4A1, P53, INGA3, MUC2, SPA, |
| | OPN, CD63, CD9, MUC1, UNCR3, PAN ADH, HCG, TIMP, PSMA, GPCR, RACK1, |
| | PSCA, VEGF, BMP2, CD81, CRP, PRO GRP, B7H3, MUC1, M2PK, CD9, PCSA, PSMA |
| Vesicle markers | TFF3, MS4A1, EphA2, GAL3, EGFR, N-gal, PCSA, CD63, MUC1, TGM2, CD81, DR3, |
| | MACC-1, TrKB, CD24, TIMP-1, A33, CD66 CEA, PRL, MMP9, MMP7, TMEM211, |
| | SCRN1, TROP2, TWEAK, CDACC1, UNC93A, APC, C-Erb, CD10, BDNF, FRT, GPR30, |
| | P53, SPR, OPN, MUC2, GRO-1, tsg 101, GDF15 |
| Vesicle markers | CD9, Erb2, Erb4, CD81, Erb3, MUC16, CD63, DLL4, HLA-Drpe, B7H3, IFNAR, 5T4, |
| | PCSA, MICE, PSMA, MFG-E8, Muc1, PSA, Muc2, Unc93a, VEGFR2, EpCAM, VEGF A, |
| | TMPRSS2, RAGE, PSCA, CD40, Muc17, IL-17-RA, CD80 |
| Benign Prostate | BCMA, CEACAM-1, HVEM, IL-1 R4, IL-10 Rb, Trappin-2, p53, hsa-miR-329, hsa-miR- |
| Hyperplasia (BPH) | 30a, hsa-miR-335, hsa-miR-152, hsa-miR-151-5p, hsa-miR-200a, hsa-miR-145, hsa-miR- |
| | 29a, hsa-miR-106b, hsa-miR-595, hsa-miR-142-5p, hsa-miR-99a, hsa-miR-20b, hsa-miR- |
| | 373, hsa-miR-502-5p, hsa-miR-29b, hsa-miR-142-3p, hsa-miR-663, hsa-miR-423-5p, hsa- |
| | miR-15a, hsa-miR-888, hsa-miR-361-3p, hsa-miR-365, hsa-miR-10b, hsa-miR-199a-3p, hsa- |
| | miR-181a, hsa-miR-19a, hsa-miR-125b, hsa-miR-760, hsa-miR-7a, hsa-miR-671-5p, hsa- |
| | miR-7c, hsa-miR-1979, hsa-miR-103 |
| Metastatic Prostate | hsa-miR-100, hsa-miR-1236, hsa-miR-1296, hsa-miR-141, hsa-miR-146b-5p, hsa-miR-17*, |
| Cancer | hsa-miR-181a, hsa-miR-200b, hsa-miR-20a*, hsa-miR-23a*, hsa-miR-331-3p, hsa-miR-375, |
| | hsa-miR-452, hsa-miR-572, hsa-miR-574-3p, hsa-miR-577, hsa-miR-582-3p, hsa-miR-937, |
| | miR-10a, miR-134, miR-141, miR-200b, miR-30a, miR-32, miR-375, miR-495, miR-564, |
| | miR-570, miR-574-3p, miR-885-3p |
| Metastatic Prostate | hsa-miR-200b, hsa-miR-375, hsa-miR-141, hsa-miR-331-3p, hsa-miR-181a, hsa-miR-574-3p |
| Cancer | |
| Prostate Cancer | hsa-miR-574-3p, hsa-miR-141, hsa-miR-432, hsa-miR-326, hsa-miR-2110, hsa-miR-181a- |
| | 2*, hsa-miR-107, hsa-miR-301a, hsa-miR-484, hsa-miR-625* |
| Metastatic Prostate | hsa-miR-582-3p, hsa-miR-20a*, hsa-miR-375, hsa-miR-200b, hsa-miR-379, hsa-miR-572, |
| Cancer | hsa-miR-513a-5p, hsa-miR-577, hsa-miR-23a*, hsa-miR-1236, hsa-miR-609, hsa-miR-17*, |
| | hsa-miR-130b, hsa-miR-619, hsa-miR-624*, hsa-miR-198 |
| Metastatic Prostate | FOX01A, SOX9, CLNS1A, PTGDS, XPO1, LETMD1, RAD23B, ABCC3, APC, CHES1, |
| Cancer | EDNRA, FRZB, HSPG2, TMPRSS2_ETV1 fusion |
| Prostate Cancer | hsa-let-7b, hsa-miR-107, hsa-miR-1205, hsa-miR-1270, hsa-miR-130b, hsa-miR-141, hsa- |
| | miR-143, hsa-miR-148b*, hsa-miR-150, hsa-miR-154*, hsa-miR-181a*, hsa-miR-181a-2*, |
| | hsa-miR-18a*, hsa-miR-19b-1*, hsa-miR-204, hsa-miR-2110, hsa-miR-215, hsa-miR-217, |
| | hsa-miR-219-2-3p, hsa-miR-23b*, hsa-miR-299-5p, hsa-miR-301a, hsa-miR-301a, hsa-miR- |
| | 326, hsa-miR-331-3p, hsa-miR-365*, hsa-miR-373*, hsa-miR-424, hsa-miR-424*, hsa-miR- |
| | 432, hsa-miR-450a, hsa-miR-451, hsa-miR-484, hsa-miR-497, hsa-miR-517*, hsa-miR-517a, |
| | hsa-miR-518f, hsa-miR-574-3p, hsa-miR-595, hsa-miR-617, hsa-miR-625*, hsa-miR-628-5p, |
| | hsa-miR-629, hsa-miR-634, hsa-miR-769-5p, hsa-miR-93, hsa-miR-96 |
| Prostate Cancer | CD9, PSMA, PCSA, CD63, CD81, B7H3, IL 6, OPG-13, IL6R, PA2G4, EZH2, RUNX2, |
| | SERPINB3, EpCam |
| Prostate Cancer | A33, a33 n15, AFP, ALA, ALIX, ALP, AnnexinV, APC, ASCA, ASPH (246-260), ASPH |
| | (666-680), ASPH (A-10), ASPH (D01P), ASPH (D03), ASPH (G-20), ASPH (H-300), |
| | AURKA, AURKB, B7H3, B7H4, BCA-225, BCNP, BDNF, BRCA, CA125 (MUC16), CA- |
| | 19-9, C-Bir, CD1.1, CD10, CD174 (Lewis y), CD24, CD44, CD46, CD59 (MEM-43), CD63, |
| | CD66e CEA, CD73, CD81, CD9, CDA, CDAC1 1a2, CEA, C-Erb2, C-erbB2, CRMP-2, |
| | CRP, CXCL12, CYFRA21-1, DLL4, DR3, EGFR, Epcam, EphA2, EphA2 (H-77), ER, |
| | ErbB4, EZH2, FASL, FRT, FRT c.f23, GDF15, GPCR, GPR30, Gro-alpha, HAP, HBD 1, |
| | HBD2, HER 3 (ErbB3), HSP, HSP70, hVEGFR2, iC3b, IL 6 Unc, IL-1B, IL6 Unc, IL6R, |
| | IL8, IL-8, INSIG-2, KLK2, L1CAM, LAMN, LDH, MACC-1, MAPK4, MART-1, MCP-1, |
| | M-CSF, MFG-E8, MIC1, MIF, MIS RII, MMG, MMP26, MMP7, MMP9, MS4A1, MUC1, |
| | MUC1 seq1, MUC1 seq11A, MUC17, MUC2, Ncam, NGAL, NPGP/NPFF2, OPG, OPN, |
| | p53, p53, PA2G4, PBP, PCSA, PDGFRB, PGP9.5, PIM1, PR (B), PRL, PSA, PSMA, |
| | PSME3, PTEN, R5-CD9 Tube 1, Reg IV, RUNX2, SCRN1, seprase, SERPINB3, SPARC, |
| | SPB, SPDEF, SRVN, STAT 3, STEAP1, TF (FL-295), TFF3, TGM2, TIMP-1, TIMP1, |
| | TIMP2, TMEM211, TMPRSS2, TNF-alpha, Trail-R2, Trail-R4, TrKB, TROP2, Tsg 101, |
| | TWEAK, UNC93A, VEGF A, YPSMA-1 |
| Prostate Cancer | 5T4, ACTG1, ADAM10, ADAM15, ALDOA, ANXA2, ANXA6, APOA1, ATP1A1, |
| Vesicle Markers | BASP1, C1orf58, C20orf114, C8B, CAPZA1, CAV1, CD151, CD2AP, CD59, CD9, CD9, |
| | CFL1, CFP, CHMP4B, CLTC, COTL1, CTNND1, CTSB, CTSZ, CYCS, DPP4, EEF1A1, |
| | EHD1, ENO1, F11R, F2, F5, FAM125A, FNBP1L, FOLH1, GAPDH, GLB1, GPX3, |
| | HIST1H1C, HIST1H2AB, HSP90AB1, HSPA1B, HSPA8, IGSF8, ITGB1, ITIH3, JUP, |
| | LDHA, LDHB, LUM, LYZ, MFGE8, MGAM, MMP9, MYH2, MYL6B, NME1, NME2, |
| | PABPC1, PABPC4, PACSIN2, PCBP2, PDCD6IP, PRDX2, PSA, PSMA, PSMA1, PSMA2, |
| | PSMA4, PSMA6, PSMA7, PSMB1, PSMB2, PSMB3, PSMB4, PSMB5, PSMB6, PSMB8, |
| | PTGFRN, RPS27A, SDCBP, SERINC5, SH3GL1, SLC3A2, SMPDL3B, SNX9, TACSTD1, |
| | TCN2, THBS1, TPI1, TSG101, TUBE, VDAC2, VPS37B, YWHAG, YWHAQ, YWHAZ |
| Prostate Cancer | FLNA, DCRN, HER 3 (ErbB3), VCAN, CD9, GAL3, CDADC1, GM-CSF, EGFR, RANK, |
| Vesicle Markers | CSA, PSMA, ChickenIgY, B7H3, PCSA, CD63, CDS, MUC1, TGM2, CD81, S100-A4, |
| | MFG-E8, Integrin, NK-2R(C-21), PSA, CD24, TIMP-1, IL6 Unc, PBP, PIM1, CA-19-9, |
| | Trail-R4, MMP9, PRL, EphA2, TWEAK, NY-ESO-1, Mammaglobin, UNC93A, A33, |
| | AURKB, CD41, XAGE-1, SPDEF, AMACR, seprase/FAP, NGAL, CXCL12, FRT, CD66e |
| | CEA, SIM2 (C-15), C-Bir, STEAP, PSIP1/LEDGF, MUC17, hVEGFR2, ERG, MUC2, |
| | ADAM10, ASPH (A-10), CA125, Gro-alpha, Tsg 101, SSX2, Trail-R4 |
| Prostate Cancer | NT5E (CD73), A33, ABL2, ADAM10, AFP, ALA, ALIX, ALPL, AMACR, Apo J/CLU, |
| Vesicle Markers | ASCA, ASPH (A-10), ASPH (D01P), AURKB, B7H3, B7H4, BCNP, BDNF, CA125 |
| | (MUC16), CA-19-9, C-Bir (Flagellin), CD10, CD151, CD24, CD3, CD41, CD44, CD46, |
| | CD59(MEM-43), CD63, CD66e CEA, CD81, CD9, CDA, CDADC1, C-erbB2, CRMP-2, |
| | CRP, CSA, CXCL12, CXCR3, CYFRA21-1, DCRN, DDX-1, DLL4, EGFR, EpCAM, |
| | EphA2, ERG, EZH2, FASL, FLNA, FRT, GAL3, GATA2, GM-CSF, Gro-alpha, HAP, |
| | HER3 (ErbB3), HSP70, HSPB1, hVEGFR2, iC3b, IL-1B, IL6 R, IL6 Unc, IL7 R |
| | alpha/CD127, IL8, INSIG-2, Integrin, KLK2, Label, LAMN, Mammaglobin, M-CSF, MFG- |
| | E8, MIF, MIS RII, MMP7, MMP9, MS4A1, MUC1, MUC17, MUC2, Ncam, NDUFB7, |
| | NGAL, NK-2R(C-21), NY-ESO-1, p53, PBP, PCSA, PDGFRB, PIM1, PRL, PSA, |
| | PSIP1/LEDGF, PSMA, RAGE, RANK, Reg IV, RUNX2, S100-A4, seprase/FAP, |
| | SERPINB3, SIM2 (C-15), SPARC, SPC, SPDEF, SPP1, SSX2, SSX4, STEAP, STEAP4, |
| | TFF3, TGM2, TIMP-1, TMEM211, Trail-R2, Trail-R4, TrKB (poly), Trop2, Tsg 101, |
| | TWEAK, UNC93A, VCAN, VEGF A, wnt-5a(C-16), XAGE, XAGE-1 |
| Prostate Vesicle | ADAM 9, ADAM10, AGR2, ALDOA, ALIX, ANXA1, ANXA2, ANXA4, ARF6, ATP1A3, |
| Membrane | B7H3, BCHE, BCL2L14 (Bcl G), BCNP1, BDKRB2, BDNFCAV1-Caveolin1, CCR2 (CC |
| | chemokine receptor 2, CD192), CCR5 (CC chemokine receptor 5), CCT2 (TCP1-beta), |
| | CD10, CD151, CD166/ALCAM, CD24, CD283/TLR3, CD41, CD46, CD49d (Integrin alpha |
| | 4, ITGA4), CD63, CD81, CD9, CD90/THY1, CDH1, CDH2, CDKN1A cyclin-dependent |
| | kinase inhibitor (p21), CGA gene (coding for the alpha subunit of glycoprotein hormones), |
| | CLDN3- Claudin3, COX2 (PTGS2), CSE1L (Cellular Apoptosis Susceptibility), CXCR3, |
| | Cytokeratin 18, Eag1 (KCNH1), EDIL3 (del-1), EDNRB—Endothelial Receptor Type B, |
| | EGFR, EpoR, EZH2 (enhancer of Zeste Homolog2), EZR, FABP5, |
| | Farnesyltransferase/geranylgeranyl diphosphate synthase 1 (GGPS1), Fatty acid synthase |
| | (FASN), FTL (light and heavy), GAL3, GDF15—Growth Differentiation Factor 15, GloI, GM- |
| | CSF, GSTP1, H3F3A, HGF (hepatocyte growth factor), hK2/Kif2a, HSP90AA1, HSPA1A/ |
| | HSP70-1, HSPB1, IGFBP-2, IGFBP-3, IL1alpha, IL-6, IQGAP1, ITGAL (Integrin alpha L |
| | chain), Ki67, KLK1, KLK10, KLK11, KLK12, KLK13, KLK14, KLK15, KLK4, KLK5, |
| | KLK6, KLK7, KLK8, KLK9, Lamp-2, LDH-A, LGALS3BP, LGALS8, MMP 1, MMP 2, |
| | MMP 25, MMP 3, MMP10, MMP-14/MT1-MMP, MMP7, MTA1nAnS, Nav1.7, NKX3-1, |
| | Notch1, NRP1/CD304, PAP (ACPP), PGP, PhIP, PIP3/BPNT1, PKM2, PKP1 |
| | (plakophilin1), PKP3 (plakophilin3), Plasma chromogranin-A (CgA), PRDX2, Prostate |
| | secretory protein (PSP94)/β-Microseminoprotein (MSP)/IGBF, PSAP, PSMA, PSMA1, |
| | PTENPTPN13/PTPL1, RPL19, seprase/FAPSET, SLC3A2/CD98, SRVN, STEAP1, |
| | Syndecan/CD138, TGFB, TGM2, TIMP-1TLR4 (CD284), TLR9 (CD289), TMPRSS1/ |
| | hepsin, TMPRSS2, TNFR1, TNFα, Transferrin receptor/CD71/TRFR, Trop2 (TACSTD2), |
| | TWEAK uPA (urokinase plasminoge activator) degrades extracellular matrix, uPAR (uPA |
| | receptor)/CD87, VEGFR1, VEGFR2 |
| Prostate Vesicle | ADAM 34, ADAM 9, AGR2, ALDOA, ANXA1, ANXA 11, ANXA4, ANXA 7, ANXA2, |
| Markers | ARF6, ATP1A1, ATP1A2, ATP1A3, BCHE, BCL2L14 (Bcl G), BDKRB2, CA215, |
| | CAV1—Caveolin1, CCR2 (CC chemokine receptor 2, CD192), CCR5 (CC chemokine receptor 5), |
| | CCT2 (TCP1-beta), CD166/ALCAM, CD49b (Integrin alpha 2, ITGA4), CD90/THY1, |
| | CDH1, CDH2, CDKN1A cyclin-dependent kinase inhibitor (p21), CGA gene (coding for the |
| | alpha subunit of glycoprotein hormones), CHMP4B, CLDN3—Claudin3, CLSTN1 |
| | (Calsyntenin-1), COX2 (PTGS2), CSE1L (Cellular Apoptosis Susceptibility), Cytokeratin 18, |
| | Eag1 (KCNH1) (plasma membrane-K+-voltage gated channel), EDIL3 (del-1), EDNRB- |
| | Endothelial Receptor Type B, Endoglin/CD105, ENOX2—Ecto-NOX disulphide Thiol |
| | exchanger 2, EPCA-2 Early prostate cancer antigen2, EpoR, EZH2 (enhancer of Zeste |
| | Homolog2), EZR, FABP5, Farnesyltransferase/geranylgeranyl diphosphate synthase 1 |
| | (GGPS1), Fatty acid synthase (FASN, plasma membrane protein), FTL (light and heavy), |
| | GDF15—Growth Differentiation Factor 15, GloI, GSTP1, H3F3A, HGF (hepatocyte growth |
| | factor), hK2 (KLK2), HSP90AA1, HSPA1A/HSP70-1, IGFBP-2, IGFBP-3, IL1alpha, IL-6, |
| | IQGAP1, ITGAL (Integrin alpha L chain), Ki67, KLK1, KLK10, KLK11, KLK12, KLK13, |
| | KLK14, KLK15, KLK4, KLK5, KLK6, KLK7, KLK8, KLK9, Lamp-2, LDH-A, |
| | LGALS3BP, LGALS8, MFAP5, MMP 1, MMP 2, MMP 24, MMP 25, MMP 3, MMP10, |
| | MMP-14/MT1-MMP, MTA1, nAnS, Nav1.7, NCAM2—Neural cell Adhesion molecule 2, |
| | NGEP/D-TMPP/IPCA-5/ANO7, NKX3-1, Notch1, NRP1/CD304, PGP, PAP (ACPP), |
| | PCA3—Prostate cancer antigen 3, Pdia3/ERp57, PhIP, phosphatidylethanolamine (PE), PIP3, |
| | PKP1 (plakophilin1), PKP3 (plakophilin3), Plasma chromogranin-A (CgA), PRDX2, Prostate |
| | secretory protein (PSP94)/β-Microseminoprotein (MSP)/IGBF, PSAP, PSMA1, PTEN, |
| | PTGFRN, PTPN13/PTPL1, PKM2, RPL19, SCA-1/ATXN1, SERINC5/TPO1, SET, |
| | SLC3A2/CD98, STEAP1, STEAP-3, SRVN, Syndecan/CD138, TGFB, Tissue Polypeptide |
| | Specific antigen TPS, TLR4 (CD284), TLR9 (CD289), TMPRSS1/hepsin, TMPRSS2, |
| | TNFR1, TNFα, CD283/TLR3, Transferrin receptor/CD71/TRFR, uPA (urokinase plasminoge |
| | activator), uPAR (uPA receptor)/CD87, VEGFR1, VEGFR2 |
| Prostate Cancer | hsa-miR-1974, hsa-miR-27b, hsa-miR-103, hsa-miR-146a, hsa-miR-22, hsa-miR-382, hsa- |
| Treatment | miR-23a, hsa-miR-376c, hsa-miR-335, hsa-miR-142-5p, hsa-miR-221, hsa-miR-142-3p, hsa- |
| | miR-151-3p, hsa-miR-21, hsa-miR-16 |
| Prostate Cancer | let-7d, miR-148a, miR-195, miR-25, miR-26b, miR-329, miR-376c, miR-574-3p, miR-888, |
| | miR-9, miR1204, miR-16-2*, miR-497, miR-588, miR-614, miR-765, miR92b*, miR-938, |
| | let-7f-2*, miR-300, miR-523, miR-525-5p, miR-1182, miR-1244, miR-520d-3p, miR-379, |
| | let-7b, miR-125a-3p, miR-1296, miR-134, miR-149, miR-150, miR-187, miR-32, miR-324- |
| | 3p, miR-324-5p, miR-342-3p, miR-378, miR-378*, miR-384, miR-451, miR-455-3p, miR- |
| | 485-3p, miR-487a, miR-490-3p, miR-502-5p, miR-548a-5p, miR-550, miR-562, miR-593, |
| | miR-593*, miR-595, miR-602, miR-603, miR-654-5p, miR-877*, miR-886-5p, miR-125a-5p, |
| | miR-140-3p, miR-192, miR-196a, miR-2110, miR-212, miR-222, miR-224*, miR-30b*, |
| | miR-499-3p, miR-505* |
| Prostate (PCSA + | miR-182, miR-663, miR-155, mirR-125a-5p, miR-548a-5p, miR-628-5p, miR-517*, miR- |
| cMVs) | 450a, miR-920, hsa-miR-619, miR-1913, miR-224*, miR-502-5p, miR-888, miR-376a, miR- |
| | 542-5p, miR-30b*, miR-1179 |
| Prostate Cancer | miR-183-96-182 cluster (miRs-183, 96 and 182), metal ion transporter such as hZIP1, |
| | SLC39A1, SLC39A2, SLC39A3, SLC39A4, SLC39A5, SLC39A6, SLC39A7, SLC39A8, |
| | SLC39A9, SLC39A10, SLC39A11, SLC39A12, SLC39A13, SLC39A14 |
| Prostate Cancer | RAD23B, FBP1, TNFRSF1A, CCNG2, NOTCH3, ETV1, BID, SIM2, LETMD1, ANXA1, |
| | miR-519d,miR-647 |
| Prostate Cancer | RAD23B, FBP1, TNFRSF1A, NOTCH3, ETV1, BID, SIM2, ANXA1, BCL2 |
| Prostate Cancer | ANPEP, ABL1, PSCA, EFNA1, HSPB1, INMT, TRIP13 |
| Prostate Cancer | E2F3, c-met, pRB, EZH2, e-cad, CAXII, CAIX, HIF-1α, Jagged, PIM-1, hepsin, RECK, |
| | Clusterin, MMP9, MTSP-1, MMP24, MMP15, IGFBP-2, IGFBP-3, E2F4, caveolin, EF-1A, |
| | Kallikrein 2, Kallikrein 3, PSGR |
| Prostate Cancer | A2ML1, BAX, C10orf47, C1orf162, CSDA, EIFC3, ETFB, GABARAPL2, GUK1, GZMH, |
| | HIST1H3B, HLA-A, HSP90AA1, NRGN, PRDX5, PTMA, RABAC1, RABAGAP1L, |
| | RPL22, SAP18, SEPW1, SOX1 |
| Prostate Cancer | NY-ESO-1, SSX-2, SSX-4, XAGE-lb, AMACR, p90 autoantigen, LEDGF |
| Prostate Cancer | A33, ABL2, ADAM10, AFP, ALA, ALIX, ALPL, ApoJ/CLU, ASCA, ASPH(A-10), |
| | ASPH(D01P), AURKB, B7H3, B7H3, B7H4, BCNP, BDNF, CA125(MUC16), CA-19-9, C- |
| | Bir, CD10, CD151, CD24, CD41, CD44, CD46, CD59(MEM-43), CD63, CD63, |
| | CD66eCEA, CD81, CD81, CD9, CD9, CDA, CDADC1, CRMP-2, CRP, CXCL12, CXCR3, |
| | CYFRA21-1, DDX-1, DLL4, DLL4, EGFR, Epcam, EphA2, ErbB2, ERG, EZH2, FASL, |
| | FLNA, FRT, GAL3, GATA2, GM-CSF, Gro-alpha, HAP, HER3(ErbB3), HSP70, HSPB1, |
| | hVEGFR2, iC3b, IL-1B, IL6R, IL6Unc, IL7Ralpha/CD127, IL8, INSIG-2, Integrin, KLK2, |
| | LAMN, Mammoglobin, M-CSF, MFG-E8, MIF, MISRII, MMP7, MMP9, MUC1, Muc1, |
| | MUC17, MUC2, Ncam, NDUFB7, NGAL, NK-2R(C-21), NT5E (CD73), p53, PBP, PCSA, |
| | PCSA, PDGFRB, PIM1, PRL, PSA, PSA, PSMA, PSMA, RAGE, RANK, RegIV, RUNX2, |
| | S100-A4, seprase/FAP, SERPINB3, SIM2(C-15), SPARC, SPC, SPDEF, SPP1, STEAP, |
| | STEAP4, TFF3, TGM2, TIMP-1, TMEM211, Trail-R2, Trail-R4, TrKB(poly), Trop2, |
| | Tsg101, TWEAK, UNC93A, VEGFA, wnt-5a(C-16) |
| Prostate Vesicles | CD9, CD63, CD81, PCSA, MUC2, MFG-E8 |
| Prostate Cancer | miR-148a, miR-329, miR-9, miR-378*, miR-25, miR-614, miR-518c*, miR-378, miR-765, |
| | let-7f-2*, miR-574-3p, miR-497, miR-32, miR-379, miR-520g, miR-542-5p, miR-342-3p, |
| | miR-1206, miR-663, miR-222 |
| Prostate Cancer | hsa-miR-877*, hsa-miR-593, hsa-miR-595, hsa-miR-300, hsa-miR-324-5p, hsa-miR-548a- |
| | 5p, hsa-miR-329, hsa-miR-550, hsa-miR-886-5p, hsa-miR-603, hsa-miR-490-3p, hsa-miR- |
| | 938, hsa-miR-149, hsa-miR-150, hsa-miR-1296, hsa-miR-384, hsa-miR-487a, hsa-miRPlus- |
| | C1089, hsa-miR-485-3p, hsa-miR-525-5p |
| Prostate Cancer | hsa-miR-451, hsa-miR-223, hsa-miR-593*, hsa-miR-1974, hsa-miR-486-5p, hsa-miR-19b, |
| | hsa-miR-320b, hsa-miR-92a, hsa-miR-21, hsa-miR-675*, hsa-miR-16, hsa-miR-876-5p, hsa- |
| | miR-144, hsa-miR-126, hsa-miR-137, hsa-miR-1913, hsa-miR-29b-1*, hsa-miR-15a, hsa- |
| | miR-93, hsa-miR-1266 |
| Inflammatory | miR-588, miR-1258, miR-16-2*, miR-938, miR-526b, miR-92b*, let-7d, miR-378*, miR- |
| Disease | 124, miR-376c, miR-26b, miR-1204, miR-574-3p, miR-195, miR-499-3p, miR-2110, miR- |
| | 888 |
| Prostate Cancer | A33, ADAM10, AMACR, ASPH (A-10), AURKB, B7H3, CA125, CA-19-9, C-Bir, CD24, |
| | CD3, CD41, CD63, CD66e CEA, CD81, CD9, CDADC1, CSA, CXCL12, DCRN, EGFR, |
| | EphA2, ERG, FLNA, FRT, GAL3, GM-CSF, Gro-alpha, HER 3 (ErbB3), hVEGFR2, IL6 |
| | Unc, Integrin, Mammaglobin, MFG-E8, MMP9, MUC1, MUC17, MUC2, NGAL, NK-2R(C- |
| | 21), NY-ESO-1, PBP, PCSA, PIM1, PRL, PSA, PSIP1/LEDGF, PSMA, RANK, S100-A4, |
| | seprase/FAP, SIM2 (C-15), SPDEF, SSX2, STEAP, TGM2, TIMP-1, Trail-R4, Tsg 101, |
| | TWEAK, UNC93A, VCAN, XAGE-1 |
| Prostate Cancer | A33, ADAM10, ALIX, AMACR, ASCA, ASPH (A-10), AURKB, B7H3, BCNP, CA125, |
| | CA-19-9, C-Bir (Flagellin), CD24, CD3, CD41, CD63, CD66e CEA, CD81, CD9, CDADC1, |
| | CRP, CSA, CXCL12, CYFRA21-1, DCRN, EGFR, EpCAM, EphA2, ERG, FLNA, GAL3, |
| | GATA2, GM-CSF, Gro alpha, HER3 (ErbB3), HSP70, hVEGFR2, iC3b, IL-1B, IL6 Unc, |
| | IL8, Integrin, KLK2, Mammaglobin, MFG-E8, MMP7, MMP9, MS4A1, MUC1, MUC17, |
| | MUC2, NGAL, NK-2R(C-21), NY-ESO-1, p53, PBP, PCSA, PIM1, PRL, PSA, PSMA, |
| | RANK, RUNX2, S100-A4, seprase/FAP, SERPINB3, SIM2 (C-15), SPC, SPDEF, SSX2, |
| | SSX4, STEAP, TGM2, TIMP-1, TRAIL R2, Trail-R4, Tsg 101, TWEAK, VCAN, VEGF A, |
| | XAGE |
| Prostate Vesicles | EpCam, CD81, PCSA, MUC2, MFG-E8 |
| Prostate Vesicles | CD9, CD63, CD81, MMP7, EpCAM |
| Prostate Cancer | let-7d, miR-148a, miR-195, miR-25, miR-26b, miR-329, miR-376c, miR-574-3p, miR-888, |
| | miR-9, miR1204, miR-16-2*, miR-497, miR-588, miR-614, miR-765, miR92b*, miR-938, |
| | let-7f-2*, miR-300, miR-523, miR-525-5p, miR-1182, miR-1244, miR-520d-3p, miR-379, |
| | let-7b, miR-125a-3p, miR-1296, miR-134, miR-149, miR-150, miR-187, miR-32, miR-324- |
| | 3p, miR-324-5p, miR-342-3p, miR-378, miR-378*, miR-384, miR-451, miR-455-3p, miR- |
| | 485-3p, miR-487a, miR-490-3p, miR-502-5p, miR-548a-5p, miR-550, miR-562, miR-593, |
| | miR-593*, miR-595, miR-602, miR-603, miR-654-5p, miR-877*, miR-886-5p, miR-125a-5p, |
| | miR-140-3p, miR-192, miR-196a, miR-2110, miR-212, miR-222, miR-224*, miR-30b*, |
| | miR-499-3p, miR-505* |
| Prostate Cancer | STAT3, EZH2, p53, MACC1, SPDEF, RUNX2, YB-1, AURKA, AURKB |
| Prostate Cancer | E.001036, E.001497, E.001561, E.002330, E.003402, E.003756, E.004838, E.005471, |
| (Ensembl ENSG | E.005882, E.005893, E.006210, E.006453, E.006625, E.006695, E.006756, E.007264, |
| identifiers) | E.007952, E.008118, E.008196, E.009694, E.009830, E.010244, E.010256, E.010278, |
| | E.010539, E.010810, E.011052, E.011114, E.011143, E.011304, E.011451, E.012061, |
| | E.012779, E.014216, E.014257, E.015133, E.015171, E.015479, E.015676, E.016402, |
| | E.018189, E.018699, E.020922, E.022976, E.023909, E.026508, E.026559, E.029363, |
| | E.029725, E.030582, E.033030, E.035141, E.036257, E.036448, E.038002, E.039068, |
| | E.039560, E.041353, E.044115, E.047410, E.047597, E.048544, E.048828, E.049239, |
| | E.049246, E.049883, E.051596, E.051620, E.052795, E.053108, E.054118, E.054938, |
| | E.056097, E.057252, E.057608, E.058729, E.059122, E.059378, E.059691, E.060339, |
| | E.060688, E.061794, E.061918, E.062485, E.063241, E.063244, E.064201, E.064489, |
| | E.064655, E.064886, E.065054, E.065057, E.065308, E.065427, E.065457, E.065485, |
| | E.065526, E.065548, E.065978, E.066455, E.066557, E.067248, E.067369, E.067704, |
| | E.068724, E.068885, E.069535, E.069712, E.069849, E.069869, E.069956, E.070501, |
| | E.070785, E.070814, E.071246, E.071626, E.071859, E.072042, E.072071, E.072110, |
| | E.072506, E.073050, E.073350, E.073584, E.073756, E.074047, E.074071, E.074964, |
| | E.075131, E.075239, E.075624, E.075651, E.075711, E.075856, E.075886, E.076043, |
| | E.076248, E.076554, E.076864, E.077097, E.077147, E.077312, E.077514, E.077522, |
| | E.078269, E.078295, E.078808, E.078902, E.079246, E.079313, E.079785, E.080572, |
| | E.080823, E.081087, E.081138, E.081181, E.081721, E.081842, E.082212, E.082258, |
| | E.082556, E.083093, E.083720, E.084234, E.084463, E.085224, E.085733, E.086062, |
| | E.086205, E.086717, E.087087, E.087301, E.088888, E.088899, E.088930, E.088992, |
| | E.089048, E.089127, E.089154, E.089177, E.089248, E.089280, E.089902, E.090013, |
| | E.090060, E.090565, E.090612, E.090615, E.090674, E.090861, E.090889, E.091140, |
| | E.091483, E.091542, E.091732, E.092020, E.092199, E.092421, E.092621, E.092820, |
| | E.092871, E.092978, E.093010, E.094755, E.095139, E.095380, E.095485, E.095627, |
| | E.096060, E.096384, E.099331, E.099715, E.099783, E.099785, E.099800, E.099821, |
| | E.099899, E.099917, E.099956, E.100023, E.100056, E.100065, E.100084, E.100142, |
| | E.100191, E.100216, E.100242, E.100271, E.100284, E.100299, E.100311, E.100348, |
| | E.100359, E.100393, E.100399, E.100401, E.100412, E.100442, E.100575, E.100577, |
| | E.100583, E.100601, E.100603, E.100612, E.100632, E.100714, E.100739, E.100796, |
| | E.100802, E.100815, E.100823, E.100836, E.100883, E.101057, E.101126, E.101152, |
| | E.101222, E.101246, E.101265, E.101365, E.101439, E.101557, E.101639, E.101654, |
| | E.101811, E.101812, E.101901, E.102030, E.102054, E.102103, E.102158, E.102174, |
| | E.102241, E.102290, E.102316, E.102362, E.102384, E.102710, E.102780, E.102904, |
| | E.103035, E.103067, E.103175, E.103194, E.103449, E.103479, E.103591, E.103599, |
| | E.103855, E.103978, E.104064, E.104067, E.104131, E.104164, E.104177, E.104228, |
| | E.104331, E.104365, E.104419, E.104442, E.104611, E.104626, E.104723, E.104760, |
| | E.104805, E.104812, E.104823, E.104824, E.105127, E.105220, E.105221, E.105281, |
| | E.105379, E.105402, E.105404, E.105409, E.105419, E.105428, E.105486, E.105514, |
| | E.105518, E.105618, E.105705, E.105723, E.105939, E.105948, E.106049, E.106078, |
| | E.106128, E.106153, E.106346, E.106392, E.106554, E.106565, E.106603, E.106633, |
| | E.107104, E.107164, E.107404, E.107485, E.107551, E.107581, E.107623, E.107798, |
| | E.107816, E.107833, E.107890, E.107897, E.107968, E.108296, E.108312, E.108375, |
| | E.108387, E.108405, E.108417, E.108465, E.108561, E.108582, E.108639, E.108641, |
| | E.108848, E.108883, E.108953, E.109062, E.109184, E.109572, E.109625, E.109758, |
| | E.109790, E.109814, E.109846, E.109956, E.110063, E.110066, E.110104, E.110107, |
| | E.110321, E.110328, E.110921, E.110955, E.111057, E.111218, E.111261, E.111335, |
| | E.111540, E.111605, E.111647, E.111785, E.111790, E.111801, E.111907, E.112039, |
| | E.112081, E.112096, E.112110, E.112144, E.112232, E.112234, E.112473, E.112578, |
| | E.112584, E.112715, E.112941, E.113013, E.113163, E.113282, E.113368, E.113441, |
| | E.113448, E.113522, E.113580, E.113645, E.113719, E.113739, E.113790, E.114054, |
| | E.114127, E.114302, E.114331, E.114388, E.114491, E.114861, E.114867, E.115053, |
| | E.115221, E.115234, E.115239, E.115241, E.115257, E.115339, E.115540, E.115541, |
| | E.115561, E.115604, E.115648, E.115738, E.115758, E.116044, E.116096, E.116127, |
| | E.116254, E.116288, E.116455, E.116478, E.116604, E.116649, E.116726, E.116754, |
| | E.116833, E.117298, E.117308, E.117335, E.117362, E.117411, E.117425, E.117448, |
| | E.117480, E.117592, E.117593, E.117614, E.117676, E.117713, E.117748, E.117751, |
| | E.117877, E.118181, E.118197, E.118260, E.118292, E.118513, E.118523, E.118640, |
| | E.118898, E.119121, E.119138, E.119318, E.119321, E.119335, E.119383, E.119421, |
| | E.119636, E.119681, E.119711, E.119820, E.119888, E.119906, E.120159, E.120328, |
| | E.120337, E.120370, E.120656, E.120733, E.120837, E.120868, E.120915, E.120948, |
| | E.121022, E.121057, E.121068, E.121104, E.121390, E.121671, E.121690, E.121749, |
| | E.121774, E.121879, E.121892, E.121903, E.121940, E.121957, E.122025, E.122033, |
| | E.122126, E.122507, E.122566, E.122705, E.122733, E.122870, E.122884, E.122952, |
| | E.123066, E.123080, E.123143, E.123154, E.123178, E.123416, E.123427, E.123595, |
| | E.123901, E.123908, E.123983, E.123992, E.124143, E.124164, E.124181, E.124193, |
| | E.124216, E.124232, E.124529, E.124562, E.124570, E.124693, E.124749, E.124767, |
| | E.124788, E.124795, E.124831, E.124942, E.125246, E.125257, E.125304, E.125352, |
| | E.125375, E.125445, E.125492, E.125676, E.125753, E.125798, E.125844, E.125868, |
| | E.125901, E.125944, E.125995, E.126062, E.126267, E.126653, E.126773, E.126777, |
| | E.126814, E.126858, E.126883, E.126934, E.126945, E.126952, E.127022, E.127328, |
| | E.127329, E.127399, E.127415, E.127554, E.127616, E.127720, E.127824, E.127884, |
| | E.127914, E.127946, E.127948, E.128050, E.128311, E.128342, E.128609, E.128626, |
| | E.128683, E.128708, E.128881, E.129315, E.129351, E.129355, E.129514, E.129636, |
| | E.129657, E.129757, E.129810, E.129990, E.130175, E.130177, E.130193, E.130255, |
| | E.130299, E.130305, E.130338, E.130340, E.130402, E.130413, E.130612, E.130713, |
| | E.130764, E.130770, E.130810, E.130826, E.130935, E.131351, E.131467, E.131473, |
| | E.131771, E.131773, E.132002, E.132275, E.132323, E.132382, E.132475, E.132481, |
| | E.132589, E.132646, E.132716, E.132881, E.133313, E.133315, E.133687, E.133835, |
| | E.133863, E.133874, E.133961, E.134077, E.134138, E.134207, E.134248, E.134308, |
| | E.134444, E.134452, E.134548, E.134684, E.134759, E.134809, E.134851, E.134955, |
| | E.135052, E.135297, E.135298, E.135387, E.135390, E.135476, E.135486, E.135525, |
| | E.135597, E.135679, E.135740, E.135829, E.135842, E.135870, E.135900, E.135914, |
| | E.135926, E.135940, E.135999, E.136044, E.136068, E.136152, E.136169, E.136280, |
| | E.136371, E.136383, E.136450, E.136521, E.136527, E.136574, E.136710, E.136750, |
| | E.136807, E.136874, E.136875, E.136930, E.136933, E.136935, E.137055, E.137124, |
| | E.137312, E.137409, E.137497, E.137513, E.137558, E.137601, E.137727, E.137776, |
| | E.137806, E.137814, E.137815, E.137948, E.137955, E.138028, E.138031, E.138041, |
| | E.138050, E.138061, E.138069, E.138073, E.138095, E.138160, E.138294, E.138347, |
| | E.138363, E.138385, E.138587, E.138594, E.138621, E.138674, E.138756, E.138757, |
| | E.138760, E.138772, E.138796, E.139211, E.139405, E.139428, E.139517, E.139613, |
| | E.139626, E.139684, E.139697, E.139874, E.140263, E.140265, E.140326, E.140350, |
| | E.140374, E.140382, E.140451, E.140481, E.140497, E.140632, E.140678, E.140694, |
| | E.140743, E.140932, E.141002, E.141012, E.141258, E.141378, E.141425, E.141429, |
| | E.141522, E.141543, E.141639, E.141744, E.141873, E.141994, E.142025, E.142208, |
| | E.142515, E.142606, E.142698, E.142765, E.142864, E.142875, E.143013, E.143294, |
| | E.143321, E.143353, E.143374, E.143375, E.143390, E.143578, E.143614, E.143621, |
| | E.143633, E.143771, E.143797, E.143816, E.143889, E.143924, E.143933, E.143947, |
| | E.144136, E.144224, E.144306, E.144381, E.144410, E.144485, E.144566, E.144671, |
| | E.144741, E.144935, E.145020, E.145632, E.145741, E.145833, E.145888, E.145907, |
| | E.145908, E.145919, E.145990, E.146067, E.146070, E.146281, E.146433, E.146457, |
| | E.146535, E.146701, E.146856, E.146966, E.147044, E.147127, E.147130, E.147133, |
| | E.147140, E.147231, E.147257, E.147403, E.147475, E.147548, E.147697, E.147724, |
| | E.148158, E.148396, E.148488, E.148672, E.148737, E.148835, E.149182, E.149218, |
| | E.149311, E.149480, E.149548, E.149646, E.150051, E.150593, E.150961, E.150991, |
| | E.151092, E.151093, E.151247, E.151304, E.151491, E.151690, E.151715, E.151726, |
| | E.151779, E.151806, E.152086, E.152207, E.152234, E.152291, E.152359, E.152377, |
| | E.152409, E.152422, E.152582, E.152763, E.152818, E.152942, E.153113, E.153140, |
| | E.153391, E.153904, E.153936, E.154099, E.154127, E.154380, E.154639, E.154723, |
| | E.154781, E.154832, E.154864, E.154889, E.154957, E.155368, E.155380, E.155508, |
| | E.155660, E.155714, E.155959, E.155980, E.156006, E.156194, E.156282, E.156304, |
| | E.156467, E.156515, E.156603, E.156650, E.156735, E.156976, E.157064, E.157103, |
| | E.157502, E.157510, E.157538, E.157551, E.157637, E.157764, E.157827, E.157992, |
| | E.158042, E.158290, E.158321, E.158485, E.158545, E.158604, E.158669, E.158715, |
| | E.158747, E.158813, E.158863, E.158901, E.158941, E.158987, E.159147, E.159184, |
| | E.159348, E.159363, E.159387, E.159423, E.159658, E.159692, E.159761, E.159921, |
| | E.160049, E.160226, E.160285, E.160294, E.160633, E.160685, E.160691, E.160789, |
| | E.160862, E.160867, E.160948, E.160972, E.161202, E.161267, E.161649, E.161692, |
| | E.161714, E.161813, E.161939, E.162069, E.162298, E.162385, E.162437, E.162490, |
| | E.162613, E.162641, E.162694, E.162910, E.162975, E.163041, E.163064, E.163110, |
| | E.163257, E.163468, E.163492, E.163530, E.163576, E.163629, E.163644, E.163749, |
| | E.163755, E.163781, E.163825, E.163913, E.163923, E.163930, E.163932, E.164045, |
| | E.164051, E.164053, E.164163, E.164244, E.164270, E.164300, E.164309, E.164442, |
| | E.164488, E.164520, E.164597, E.164749, E.164754, E.164828, E.164916, E.164919, |
| | E.164924, E.165084, E.165119, E.165138, E.165215, E.165259, E.165264, E.165280, |
| | E.165359, E.165410, E.165496, E.165637, E.165646, E.165661, E.165688, E.165695, |
| | E.165699, E.165792, E.165807, E.165813, E.165898, E.165923, E.165934, E.166263, |
| | E.166266, E.166329, E.166337, E.166341, E.166484, E.166526, E.166596, E.166598, |
| | E.166710, E.166747, E.166833, E.166860, E.166946, E.166971, E.167004, E.167085, |
| | E.167110, E.167113, E.167258, E.167513, E.167552, E.167553, E.167604, E.167635, |
| | E.167642, E.167658, E.167699, E.167744, E.167751, E.167766, E.167772, E.167799, |
| | E.167815, E.167969, E.167978, E.167987, E.167996, E.168014, E.168036, E.168066, |
| | E.168071, E.168148, E.168298, E.168393, E.168575, E.168653, E.168746, E.168763, |
| | E.168769, E.168803, E.168916, E.169087, E.169093, E.169122, E.169189, E.169213, |
| | E.169242, E.169410, E.169418, E.169562, E.169592, E.169612, E.169710, E.169763, |
| | E.169789, E.169807, E.169826, E.169957, E.170017, E.170027, E.170037, E.170088, |
| | E.170144, E.170275, E.170310, E.170315, E.170348, E.170374, E.170381, E.170396, |
| | E.170421, E.170430, E.170445, E.170549, E.170632, E.170703, E.170743, E.170837, |
| | E.170854, E.170906, E.170927, E.170954, E.170959, E.171121, E.171155, E.171180, |
| | E.171202, E.171262, E.171302, E.171345, E.171428, E.171488, E.171490, E.171492, |
| | E.171540, E.171643, E.171680, E.171723, E.171793, E.171861, E.171953, E.172115, |
| | E.172283, E.172345, E.172346, E.172466, E.172590, E.172594, E.172653, E.172717, |
| | E.172725, E.172733, E.172831, E.172867, E.172893, E.172939, E.173039, E.173230, |
| | E.173366, E.173473, E.173540, E.173585, E.173599, E.173714, E.173726, E.173805, |
| | E.173809, E.173826, E.173889, E.173898, E.173905, E.174021, E.174100, E.174332, |
| | E.174842, E.174996, E.175063, E.175110, E.175166, E.175175, E.175182, E.175198, |
| | E.175203, E.175216, E.175220, E.175334, E.175416, E.175602, E.175866, E.175946, |
| | E.176102, E.176105, E.176155, E.176171, E.176371, E.176515, E.176900, E.176971, |
| | E.176978, E.176994, E.177156, E.177239, E.177354, E.177409, E.177425, E.177459, |
| | E.177542, E.177548, E.177565, E.177595, E.177628, E.177674, E.177679, E.177694, |
| | E.177697, E.177731, E.177752, E.177951, E.178026, E.178078, E.178104, E.178163, |
| | E.178175, E.178187, E.178234, E.178381, E.178473, E.178741, E.178828, E.178950, |
| | E.179091, E.179115, E.179119, E.179348, E.179388, E.179776, E.179796, E.179869, |
| | E.179912, E.179981, E.180035, E.180198, E.180287, E.180318, E.180667, E.180869, |
| | E.180979, E.180998, E.181072, E.181163, E.181222, E.181234, E.181513, E.181523, |
| | E.181610, E.181773, E.181873, E.181885, E.181924, E.182013, E.182054, E.182217, |
| | E.182271, E.182318, E.182319, E.182512, E.182732, E.182795, E.182872, E.182890, |
| | E.182944, E.183048, E.183092, E.183098, E.183128, E.183207, E.183292, E.183431, |
| | E.183520, E.183684, E.183723, E.183785, E.183831, E.183856, E.184007, E.184047, |
| | E.184113, E.184156, E.184254, E.184363, E.184378, E.184470, E.184481, E.184508, |
| | E.184634, E.184661, E.184697, E.184708, E.184735, E.184840, E.184916, E.185043, |
| | E.185049, E.185122, E.185219, E.185359, E.185499, E.185554, E.185591, E.185619, |
| | E.185736, E.185860, E.185896, E.185945, E.185972, E.186198, E.186205, E.186376, |
| | E.186472, E.186575, E.186591, E.186660, E.186814, E.186834, E.186868, E.186889, |
| | E.187097, E.187323, E.187492, E.187634, E.187764, E.187792, E.187823, E.187837, |
| | E.187840, E.188021, E.188171, E.188186, E.188739, E.188771, E.188846, E.189060, |
| | E.189091, E.189143, E.189144, E.189221, E.189283, E.196236, E.196419, E.196436, |
| | E.196497, E.196504, E.196526, E.196591, E.196700, E.196743, E.196796, E.196812, |
| | E.196872, E.196975, E.196993, E.197081, E.197157, E.197217, E.197223, E.197299, |
| | E.197323, E.197353, E.197451, E.197479, E.197746, E.197779, E.197813, E.197837, |
| | E.197857, E.197872, E.197969, E.197976, E.198001, E.198033, E.198040, E.198087, |
| | E.198131, E.198156, E.198168, E.198205, E.198216, E.198231, E.198265, E.198366, |
| | E.198431, E.198455, E.198563, E.198586, E.198589, E.198712, E.198721, E.198732, |
| | E.198783, E.198793, E.198804, E.198807, E.198824, E.198841, E.198951, E.203301, |
| | E.203795, E.203813, E.203837, E.203879, E.203908, E.204231, E.204316, E.204389, |
| | E.204406, E.204560, E.204574 |
| Prostate Markers | E.005893 (LAMP2), E.006756 (ARSD), E.010539 (ZNF200), E.014257 (ACPP), E.015133 |
| (Ensembl ENSG | (CCDC88C), E.018699 (TTC27), E.044115 (CTNNA1), E.048828 (FAM120A), E.051620 |
| identifiers) | (HEBP2), E.056097 (ZFR), E.060339 (CCAR1), E.063241 (ISOC2), E.064489 (MEF2BNB- |
| | MEF2B), E.064886 (CHI3L2), E.066455 (GOLGA5), E.069535 (MAOB), E.072042 |
| | (RDH11), E.072071 (LPHN1), E.074047 (GLI2), E.076248 (UNO), E.076554 (TPD52), |
| | E.077147 (TM9SF3), E.077312 (SNRPA), E.081842 (PCDHA6), E.086717 (PPEF1), |
| | E.088888 (MAVS), E.088930 (XRN2), E.089902 (RCOR1), E.090612 (ZNF268), E.092199 |
| | (HNRNPC), E.095380 (NANS), E.099783 (HNRNPM), E.100191 (SLC5A4), E.100216 |
| | (TOMM22), E.100242 (SUN2), E.100284 (TOM1), E.100401 (RANGAP1), E.100412 |
| | (ACO2), E.100836 (PABPN1), E.102054 (RBBP7), E.102103 (PQBP1), E.103599 (IQCH), |
| | E.103978 (TMEM87A), E.104177 (MYEF2), E.104228 (TRIM35), E.105428 (ZNRF4), |
| | E.105518 (TMEM205), E.106603 (C7orf44; COA1), E.108405 (P2RX1), E.111057 |
| | (KRT18), E.111218 (PRMT8), E.112081 (SRSF3), E.112144 (ICK), E.113013 (HSPA9), |
| | E.113368 (LMNB1), E.115221 (ITGB6), E.116096 (SPR), E.116754 (SRSF11), E.118197 |
| | (DDX59), E.118898 (PPL), E.119121 (TRPM6), E.119711 (ALDH6A1), E.120656 (TAF12), |
| | E.121671 (CRY2), E.121774 (KHDRBS1), E.122126 (OCRL), E.122566 (HNRNPA2B1), |
| | E.123901 (GPR83), E.124562 (SNRPC), E.124788 (ATXN1), E.124795 (DEK), E.125246 |
| | (CLYBL), E.126883 (NUP214), E.127616 (SMARCA4), E.127884 (ECHS1), E.128050 |
| | (PAICS), E.129351 (ILF3), E.129757 (CDKN1C), E.130338 (TULP4), E.130612 |
| | (CYP2G1P), E.131351 (HAUS8), E.131467 (PSME3), E.133315 (MACROD1), E.134452 |
| | (FBXO18), E.134851 (TMEM165), E.135940 (COX5B), E.136169 (SETDB2), E.136807 |
| | (CDK9), E.137727 (ARHGAP20), E.138031 (ADCY3), E.138050 (THUMPD2), E.138069 |
| | (RAB1A), E.138594 (TMOD3), E.138760 (SCARB2), E.138796 (HADH), E.139613 |
| | (SMARCC2), E.139684 (ESD), E.140263 (SORD), E.140350 (ANP32A), E.140632 |
| | (GLYR1), E.142765 (SYTL1), E.143621 (ILF2), E.143933 (CALM2), E.144410 (CPO), |
| | E.147127 (RAB41), E.151304 (SRFBP1), E.151806 (GUF1), E.152207 (CYSLTR2), |
| | E.152234 (ATP5A1), E.152291 (TGOLN2), E.154723 (ATP5J), E.156467 (UQCRB), |
| | E.159387 (IRX6), E.159761 (C16orf86), E.161813 (LARP4), E.162613 (FUBP1), E.162694 |
| | (EXTL2), E.165264 (NDUFB6), E.167113 (COQ4), E.167513 (CDT1), E.167772 |
| | (ANGPTL4), E.167978 (SRRM2), E.168916 (ZNF608), E.169763 (PRYP3), E.169789 |
| | (PRY), E.169807 (PRY2), E.170017 (ALCAM), E.170144 (HNRNPA3), E.170310 (STX8), |
| | E.170954 (ZNF415), E.170959 (DCDC5), E.171302 (CANT1), E.171643 (S100Z), E.172283 |
| | (PRYP4), E.172590 (MRPL52), E.172867 (KRT2), E.173366 (TLR9), E.173599 (PC), |
| | E.177595 (PIDD), E.178473 (UCN3), E.179981 (TSHZ1), E.181163 (NPM1), E.182319 |
| | (Tyrosine-protein kinase SgK223), E.182795 (C1orf116), E.182944 (EWSR1), E.183092 |
| | (BEGAIN), E.183098 (GPC6), E.184254 (ALDH1A3), E.185619 (PCGF3), E.186889 |
| | (TMEM17), E.187837 (HIST1H1C), E.188771 (C11orf34), E.189060 (H1F0), E.196419 |
| | (XRCC6), E.196436 (NPIPL2), E.196504 (PRPF40A), E.196796, E.196993, E.197451 |
| | (HNRNPAB), E.197746 (PSAP), E.198131 (ZNF544), E.198156, E.198732 (SMOC1), |
| | E.198793 (MTOR), E.039068 (CDH1), E.173230 (GOLGB1), E.124193 (SRSF6), E.140497 |
| | (SCAMP2), E.168393 (DTYMK), E.184708 (EIF4ENIF1), E.124164 (VAPB), E.125753 |
| | (VASP), E.118260 (CREB1), E.135052 (GOLM1), E.010244 (ZNF207), E.010278 (CD9), |
| | E.047597 (XK), E.049246 (PER3), E.069849 (ATP1B3), E.072506 (HSD17B10), E.081138 |
| | (CDH7), E.099785 (MARCH2), E.104331 (IMPAD1), E.104812 (GYS1), E.120868 |
| | (APAF1), E.123908 (EIF2C2), E.125492 (BARHL1), E.127328 (RAB3IP), E.127329 |
| | (PTPRB), E.129514 (FOXA1), E.129657 (SEC14L1), E.129990 (SYT5), E.132881 (RSG1), |
| | E.136521 (NDUFB5), E.138347 (MYPN), E.141429 (GALNT1), E.144566 (RAB5A), |
| | E.151715 (TMEM45B), E.152582 (SPEF2), E.154957 (ZNF18), E.162385 (MAGOH), |
| | E.165410 (CFL2), E.168298 (HIST1H1E), E.169418 (NPR1), E.178187 (ZNF454), |
| | E.178741 (COX5A), E.179115 (FARSA), E.182732 (RGS6), E.183431 (SF3A3), E.185049 |
| | (WHSC2), E.196236 (XPNPEP3), E.197217 (ENTPD4), E.197813, E.203301, E.116833 |
| | (NR5A2), E.121057 (AKAP1), E.005471 (ABCB4), E.071859 (FAM50A), E.084234 |
| | (APLP2), E.101222 (SPEF1), E.103175 (WFDC1), E.103449 (SALL1), E.104805 (NUCB1), |
| | E.105514 (RAB3D), E.107816 (LZTS2), E.108375 (RNF43), E.109790 (KLHL5), E.112039 |
| | (FANCE), E.112715 (VEGFA), E.121690 (DEPDC7), E.125352 (RNF113A), E.134548 |
| | (C12orG9), E.136152 (COG3), E.143816 (WNT9A), E.147130 (ZMYM3), E.148396 |
| | (SEC16A), E.151092 (NGLY1), E.151779 (NBAS), E.155508 (CNOT8), E.163755 (HPS3), |
| | E.166526 (ZNF3), E.172733 (PURG), E.176371 (ZSCAN2), E.177674 (AGTRAP), |
| | E.181773 (GPR3), E.183048 (SLC25A10; MRPL12 SLC25A10), E.186376 (ZNF75D), |
| | E.187323 (DCC), E.198712 (MT-CO2), E.203908 (C6orf221; KHDC3L), E.001497 |
| | (LAS1L), E.009694 (ODZ1), E.080572 (CXorf41; PIH1D3), E.083093 (PALB2), E.089048 |
| | (ESF1), E.100065 (CARD10), E.100739 (BDKRB1), E.102904 (TSNAXIP1), E.104824 |
| | (HNRNPL), E.107404 (DVL1), E.110066 (SUV420H1), E.120328 (PCDHB12), E.121903 |
| | (ZSCAN20), E.122025 (FLT3), E.136930 (PSMB7), E.142025 (DMRTC2), E.144136 |
| | (SLC20A1), E.146535 (GNA12), E.147140 (NONO), E.153391 (INO80C), E.164919 |
| | (COX6C), E.171540 (OTP), E.177951 (BET1L), E.179796 (LRRC3B), E.197479 |
| | (PCDHB11), E.198804 (MT-CO1), E.086205 (FOLH1), E.100632 (ERH), E.100796 |
| | (SMEK1), E.104760 (FGL1), E.114302 (PRKAR2A), E.130299 (GTPBP3), E.133961 |
| | (NUMB), E.144485 (HES6), E.167085 (PHB), E.167635 (ZNF146), E.177239 (MAN1B1), |
| | E.184481 (FOXO4), E.188171 (ZNF626), E.189221 (MAOA), E.157637 (SLC38A10), |
| | E.100883 (SRP54), E.105618 (PRPF31), E.119421 (NDUFA8), E.170837 (GPR27), |
| | E.168148 (HIST3H3), E.135525 (MAP7), E.174996 (KLC2), E.018189 (RUFY3), E.183520 |
| | (UTP11L), E.173905 (GOLIM4), E.165280 (VCP), E.022976 (ZNF839), E.059691 |
| | (PET112), E.063244 (U2AF2), E.075651 (PLD1), E.089177 (KIF16B), E.089280 (FUS), |
| | E.094755 (GABRP), E.096060 (FKBP5), E.100023 (PPIL2), E.100359 (SGSM3), E.100612 |
| | (DHRS7), E.104131 (EIF3J), E.104419 (NDRG1), E.105409 (ATP1A3), E.107623 (GDF10), |
| | E.111335 (OAS2), E.113522 (RAD50), E.115053 (NCL), E.120837 (NFYB), E.122733 |
| | (KIAA1045), E.123178 (SPRYD7), E.124181 (PLCG1), E.126858 (RHOT1), E.128609 |
| | (NDUFA5), E.128683 (GAD1), E.130255 (RPL36), E.133874 (RNF122), E.135387 |
| | (CAPRIN1), E.135999 (EPC2), E.136383 (ALPK3), E.139405 (C12orf52), E.141012 |
| | (GALNS), E.143924 (EML4), E.144671 (SLC22A14), E.145741 (BTF3), E.145907 |
| | (G3BP1), E.149311 (ATM), E.153113 (CAST), E.157538 (DSCR3), E.157992 (KRTCAP3), |
| | E.158901 (WFDC8), E.165259 (HDX), E.169410 (PTPN9), E.170421 (KRT8), E.171155 |
| | (C1GALT1C1), E.172831 (CES2), E.173726 (TOMM20), E.176515, E.177565 (TBL1XR1), |
| | E.177628 (GBA), E.179091 (CYC1), E.189091 (SF3B3), E.197299 (BLM), E.197872 |
| | (FAM49A), E.198205 (ZXDA), E.198455 (ZXDB), E.082212 (ME2), E.109956 (B3GAT1), |
| | E.169710 (FASN), E.011304 (PTBP1), E.057252 (SOAT1), E.059378 (PARP12), E.082258 |
| | (CCNT2), E.087301 (TXNDC16), E.100575 (TIMM9), E.101152 (DNAJC5), E.101812 |
| | (H2BFM), E.102384 (CENPI), E.108641 (B9D1), E.119138 (KLF9), E.119820 (YIPF4), |
| | E.125995 (ROMO1), E.132323 (ILKAP), E.134809 (TIMM10), E.134955 (SLC37A2), |
| | E.135476 (ESPL1), E.136527 (TRA2B), E.137776 (SLTM), E.139211 (AMIGO2), E.139428 |
| | (MMAB), E.139874 (SSTR1), E.143321 (HDGF), E.164244 (PRRC1), E.164270 (HTR4), |
| | E.165119 (HNRNPK), E.165637 (VDAC2), E.165661 (QSOX2), E.167258 (CDK12), |
| | E.167815 (PRDX2), E.168014 (C2CD3), E.168653 (NDUFS5), E.168769 (TET2), E.169242 |
| | (EFNA1), E.175334 (BANF1), E.175416 (CLTB), E.177156 (TALDO1), E.180035 (ZNF48), |
| | E.186591 (UBE2H), E.187097 (ENTPD5), E.188739 (RBM34), E.196497 (IPO4), E.197323 |
| | (TRIM33), E.197857 (ZNF44), E.197976 (AKAP17A), E.064201 (TSPAN32), E.088992 |
| | (TESC), E.092421 (SEMA6A), E.100601 (ALKBH1), E.101557 (USP14), E.103035 |
| | (PSMD7), E.106128 (GHRHR), E.115541 (HSPE1), E.121390 (PSPC1), E.124216 (SNAI1), |
| | E.130713 (EXOSC2), E.132002 (DNAJB1), E.139697 (SBNO1), E.140481 (CCDC33), |
| | E.143013 (LMO4), E.145020 (AMT), E.145990 (GFOD1), E.146070 (PLA2G7), E.164924 |
| | (YWHAZ), E.165807 (PPP1R36), E.167751 (KLK2), E.169213 (RAB3B), E.170906 |
| | (NDUFA3), E.172725 (CORO1B), E.174332 (GLIS1), E.181924 (CHCHD8), E.183128 |
| | (CALHM3), E.204560 (DHX16), E.204574 (ABCF1), E.146701 (MDH2), E.198366 |
| | (HIST1H3A), E.081181 (ARG2), E.185896 (LAMP1), E.077514 (POLD3), E.099800 |
| | (TIMM13), E.100299 (ARSA), E.105419 (MEIS3), E.108417 (KRT37), E.113739 (STC2), |
| | E.125868 (DSTN), E.145908 (ZNF300), E.168575 (SLC20A2), E.182271 (TMIGD1), |
| | E.197223 (C1D), E.186834 (HEXIM1), E.001561 (ENPP4), E.011451 (WIZ), E.053108 |
| | (FSTL4), E.064655 (EYA2), E.065308 (TRAM2), E.075131 (TIPIN), E.081087 (OSTM1), |
| | E.092020 (PPP2R3C), E.096384 (HSP90AB1), E.100348 (TXN2), E.100577 (GSTZ1), |
| | E.100802 (C14orf93), E.101365 (IDH3B), E.101654 (RNMT), E.103067 (ESRP2), E.104064 |
| | (GABPB1), E.104823 (ECH1), E.106565 (TMEM176B), E.108561 (C1QBP), E.115257 |
| | (PCSK4), E.116127 (ALMS1), E.117411 (B4GALT2), E.119335 (SET), E.120337 |
| | (TNFSF18), E.122033 (MTIF3), E.122507 (BBS9), E.122870 (BICC1), E.130177 (CDC16), |
| | E.130193 (C8orf55; THEM6), E.130413 (STK33), E.130770 (ATPIF1), E.133687 (TMTC1), |
| | E.136874 (STX17), E.137409 (MTCH1), E.139626 (ITGB7), E.141744 (PNMT), E.145888 |
| | (GLRA1), E.146067 (FAM193B), E.146433 (TMEM181), E.149480 (MTA2), E.152377 |
| | (SPOCK1), E.152763 (WDR78), E.156976 (EIF4A2), E.157827 (FMNL2), E.158485 |
| | (CD1B), E.158863 (FAM160B2), E.161202 (DVL3), E.161714 (PLCD3), E.163064 (EN1), |
| | E.163468 (CCT3), E.164309 (CMYA5), E.164916 (FOXK1), E.165215 (CLDN3), E.167658 |
| | (EEF2), E.170549 (IRX1), E.171680 (PLEKHG5), E.178234 (GALNT11), E.179869 |
| | (ABCA13), E.179912 (R3HDM2), E.180869 (C1orf180), E.180979 (LRRC57), E.182872 |
| | (RBM10), E.183207 (RUVBL2), E.184113 (CLDN5), E.185972 (CCIN), E.189144 |
| | (ZNF573), E.197353 (LYPD2), E.197779 (ZNF81), E.198807 (PAX9), E.100442 (FKBP3), |
| | E.111790 (FGFR1OP2), E.136044 (APPL2), E.061794 (MRPS35), E.065427 (KARS), |
| | E.068885 (IFT80), E.104164 (PLDN; BLOC1S6), E.105127 (AKAP8), E.123066 |
| | (MED13L), E.124831 (LRRFIP1), E.125304 (TM9SF2), E.126934 (MAP2K2), E.130305 |
| | (NSUN5), E.135298 (BAI3), E.135900 (MRPL44), E.136371 (MTHFS), E.136574 |
| | (GATA4), E.140326 (CDAN1), E.141378 (PTRH2), E.141543 (EIF4A3), E.150961 |
| | (SEC24D), E.155368 (DBI), E.161649 (CD300LG), E.161692 (DBF4B), E.162437 |
| | (RAVER2), E.163257 (DCAF16), E.163576 (EFHB), E.163781 (TOPBP1), E.163913 |
| | (IFT122), E.164597 (COG5), E.165359 (DDX26B), E.165646 (SLC18A2), E.169592 |
| | (INO80E), E.169957 (ZNF768), E.171492 (LRRC8D), E.171793 (CTPS; CTPS1), E.171953 |
| | (ATPAF2), E.175182 (FAM131A), E.177354 (C10orf71), E.181610 (MRPS23), E.181873 |
| | (IBA57), E.187792 (ZNF70), E.187823 (ZCCHC16), E.196872 (C2orf55; KIAA1211L), |
| | E.198168 (SVIP), E.160633 (SAFB), E.177697 (CD151), E.181072 (CHRM2), E.012779 |
| | (ALOX5), E.065054 (SLC9A3R2), E.074071 (MRPS34), E.100815 (TRIP11), E.102030 |
| | (NAA10), E.106153 (CHCHD2), E.126814 (TRMT5), E.126952 (NXF5), E.136450 |
| | (SRSF1), E.136710 (CCDC115), E.137124 (ALDH1B1), E.143353 (LYPLAL1), E.162490 |
| | (C1orf187; DRAXIN), E.167799 (NUDT8), E.171490 (RSL1D1), E.173826 (KCNH6), |
| | E.173898 (SPTBN2), E.176900 (OR51T1), E.181513 (ACBD4), E.185554 (NXF2), |
| | E.185945 (NXF2B), E.108848 (LUC7L3), E.029363 (BCLAF1), E.038002 (AGA), E.108312 |
| | (UBTF), E.166341 (DCHS1), E.054118 (THRAP3), E.135679 (MDM2), E.166860 |
| | (ZBTB39), E.183684 (THOC4; ALYREF), E.004838 (ZMYND10), E.007264 (MATK), |
| | E.020922 (MRE11A), E.041353 (RAB27B), E.052795 (FNIP2), E.075711 (DLG1), |
| | E.087087 (SRRT), E.090060 (PAPOLA), E.095139 (ARCN1), E.099715 (PCDH11Y), |
| | E.100271 (TTLL1), E.101057 (MYBL2), E.101265 (RASSF2), E.101901 (ALG13), |
| | E.102290 (PCDH11X), E.103194 (USP10), E.106554 (CHCHD3), E.107833 (NPM3), |
| | E.110063 (DCPS), E.111540 (RAB5B), E.113448 (PDE4D), E.115339 (GALNT3), |
| | E.116254 (CHD5), E.117425 (PTCH2), E.117614 (SYF2), E.118181 (RPS25), E.118292 |
| | (C1orf54), E.119318 (RAD23B), E.121022 (COPS5), E.121104 (FAM117A), E.123427 |
| | (METTL21B), E.125676 (THOC2), E.132275 (RRP8), E.137513 (NARS2), E.138028 |
| | (CGREF1), E.139517 (LNX2), E.143614 (GATAD2B), E.143889 (HNRPLL), E.145833 |
| | (DDX46), E.147403 (RPL10), E.148158 (SNX30), E.151690 (MFSD6), E.153904 (DDAH1), |
| | E.154781 (C3orf19), E.156650 (KAT6B), E.158669 (AGPAT6), E.159363 (ATP13A2), |
| | E.163530 (DPPA2), E.164749 (HNF4G), E.165496 (RPL10L), E.165688 (PMPCA), |
| | E.165792 (METTL17), E.166598 (HSP90B1), E.168036 (CTNNB1), E.168746 (C20orf62), |
| | E.170381 (SEMA3E), E.171180 (OR2M4), E.171202 (TMEM126A), E.172594 |
| | (SMPDL3A), E.172653 (C17orf66), E.173540 (GMPPB), E.173585 (CCR9), E.173809 |
| | (TDRD12), E.175166 (PSMD2), E.177694 (NAALADL2), E.178026 (FAM211B; |
| | C22orf36), E.184363 (PKP3), E.187634 (SAMD11), E.203837 (PNLIPRP3), E.169122 |
| | (FAM110B), E.197969 (VPS13A), E.136068 (FLNB), E.075856 (SART3), E.081721 |
| | (DUSP12), E.102158 (MAGT1), E.102174 (PHEX), E.102316 (MAGED2), E.104723 |
| | (TUSC3), E.105939 (ZC3HAV1), E.108883 (EFTUD2), E.110328 (GALNTL4), E.111785 |
| | (RIC8B), E.113163 (COL4A3BP), E.115604 (IL18R1), E.117362 (APH1A), E.117480 |
| | (FAAH), E.124767 (GLO1), E.126267 (COX6B1), E.130175 (PRKCSH), E.135926 |
| | (TMBIM1), E.138674 (SEC31A), E.140451 (PIF1), E.143797 (MBOAT2), E.149646 |
| | (C20orf152), E.157064 (NMNAT2), E.160294 (MCM3AP), E.165084 (C8orf34), E.166946 |
| | (CCNDBP1), E.170348 (TMED10), E.170703 (TTLL6), E.175198 (PCCA), E.180287 |
| | (PLD5), E.183292 (MIR5096), E.187492 (CDHR4), E.188846 (RPL14), E.015479 |
| | (MATR3), E.100823 (APEX1), E.090615 (GOLGA3), E.086062 (B4GALT1), E.138385 |
| | (SSB), E.140265 (ZSCAN29), E.140932 (CMTM2), E.167969 (ECI1), E.135486 |
| | (HNRNPA1), E.137497 (NUMA1), E.181523 (SGSH), E.099956 (SMARCB1), E.049883 |
| | (PTCD2), E.082556 (OPRK1), E.090674 (MCOLN1), E.107164 (FUBP3), E.108582 (CPD), |
| | E.109758 (HGFAC), E.111605 (CPSF6), E.115239 (ASB3), E.121892 (PDS5A), E.125844 |
| | (RRBP1), E.130826 (DKC1), E.132481 (TRIM47), E.135390 (ATP5G2), E.136875 (PRPF4), |
| | E.138621 (PPCDC), E.145632 (PLK2), E.150051 (MKX), E.153140 (CETN3), E.154127 |
| | (UBASH3B), E.156194 (PPEF2), E.163825 (RTP3), E.164053 (ATRIP), E.164442 |
| | (CITED2), E.168066 (SF1), E.170430 (MGMT), E.175602 (CCDC85B), E.177752 (YIPF7), |
| | E.182512 (GLRX5), E.188186 (C7orf59), E.198721 (ECI2), E.204389 (HSPA1A), E.010256 |
| | (UQCRC1), E.076043 (REXO2), E.102362 (SYTL4), E.161939 (C17orf49), E.173039 |
| | (RELA), E.014216 (CAPN1), E.054938 (CHRDL2), E.065526 (SPEN), E.070501 (POLB), |
| | E.078808 (SDF4), E.083720 (OXCT1), E.100084 (HIRA), E.101246 (ARFRP1), E.102241 |
| | (HTATSF1), E.103591 (AAGAB), E.104626 (ERI1), E.105221 (AKT2), E.105402 (NAPA), |
| | E.105705 (SUGP1), E.106346 (USP42), E.108639 (SYNGR2), E.110107 (PRPF19), |
| | E.112473 (SLC39A7), E.113282 (CLINT1), E.115234 (SNX17), E.115561 (CHMP3), |
| | E.119906 (FAM178A), E.120733 (KDM3B), E.125375 (ATP5S), E.125798 (FOXA2), |
| | E.127415 (IDUA), E.129810 (SGOL1), E.132382 (MYBBP1A), E.133313 (CNDP2), |
| | E.134077 (THUMPD3), E.134248 (HBXIP), E.135597 (REPS1), E.137814 (HAUS2), |
| | E.138041 (SMEK2), E.140382 (HMG20A), E.143578 (CREB3L4), E.144224 (UBXN4), |
| | E.144306 (SCRN3), E.144741 (SLC25A26), E.145919 (BOD1), E.146281 (PM20D2), |
| | E.152359 (POC5), E.152409 (JMY), E.154889 (MPPE1), E.157551 (KCNJ15), E.157764 |
| | (BRAF), E.158987 (RAPGEF6), E.162069 (CCDC64B), E.162910 (MRPL55), E.163749 |
| | (CCDC158), E.164045 (CDC25A), E.164300 (SERINC5), E.165898 (ISCA2), E.167987 |
| | (VPS37C), E.168763 (CNNM3), E.170374 (SP7), E.171488 (LRRC8C), E.178381 |
| | (ZFAND2A), E.180998 (GPR137C), E.182318 (ZSCAN22), E.198040 (ZNF84), E.198216 |
| | (CACNA1E), E.198265 (HELZ), E.198586 (TLK1), E.203795 (FAM24A), E.204231 |
| | (RXRB), E.123992 (DNPEP), E.184634 (MED12), E.181885 (CLDN7), E.186660 (ZFP91), |
| | E.126777 (KTN1), E.080823 (MOK), E.101811 (CSTF2), E.124570 (SERPINB6), E.148835 |
| | (TAF5), E.158715 (SLC45A3), E.110955 (ATP5B), E.127022 (CANX), E.142208 (AKT1), |
| | E.128881 (TTBK2), E.147231 (CXorf57), E.006210 (CX3CL1), E.009830 (POMT2), |
| | E.011114 (BTBD7), E.065057 (NTHL1), E.068724 (TTC7A), E.073584 (SMARCE1), |
| | E.079785 (DDX1), E.084463 (WBP11), E.091140 (DLD), E.099821 (POLRMT), E.101126 |
| | (ADNP), E.104442 (ARMC1), E.105486 (LIG1), E.110921 (MVK), E.113441 (LNPEP), |
| | E.115758 (ODC1), E.116726 (PRAMEF12), E.119681 (LTBP2), E.136933 (RABEPK), |
| | E.137815 (RTF1), E.138095 (LRPPRC), E.138294 (MSMB), E.141873 (SLC39A3), |
| | E.142698 (C1orf94), E.143390 (RFX5), E.148488 (ST8SIA6), E.148737 (TCF7L2), |
| | E.151491 (EPS8), E.152422 (XRCC4), E.154832 (CXXC1), E.158321 (AUTS2), E.159147 |
| | (DONSON), E.160285 (LSS), E.160862 (AZGP1), E.160948 (VPS28), E.160972 |
| | (PPP1R16A), E.165934 (CPSF2), E.167604 (NFKBID), E.167766 (ZNF83), E.168803 |
| | (ADAL), E.169612 (FAM103A1), E.171262 (FAM98B), E.172893 (DHCR7), E.173889 |
| | (PHC3), E.176971 (FIBIN), E.177548 (RABEP2), E.179119 (SPTY2D1), E.184378 |
| | (ACTRT3), E.184508 (HDDC3), E.185043 (CIB1), E.186814 (ZSCAN30), E.186868 |
| | (MAPT), E.196812 (ZSCAN16), E.198563 (DDX39B), E.124529 (HIST1H4B), E.141002 |
| | (TCF25), E.174100 (MRPL45), E.109814 (UGDH), E.138756 (BMP2K), E.065457 |
| | (ADAT1), E.105948 (TTC26), E.109184 (DCUN1D4), E.125257 (ABCC4), E.126062 |
| | (TMEM115), E.142515 (KLK3), E.144381 (HSPD1), E.166710 (B2M), E.198824 |
| | (CHAMP1), E.078902 (TOLLIP), E.099331 (MYO9B), E.102710 (FAM48A), E.107485 |
| | (GATA3), E.120948 (TARDBP), E.187764 (SEMA4D), E.103855 (CD276), E.117751 |
| | (PPP1R8), E.173714 (WFIKKN2), E.172115 (CYCS), E.005882 (PDK2), E.007952 (NOX1), |
| | E.008118 (CAMK1G), E.012061 (ERCC1), E.015171 (ZMYND11), E.036257 (CUL3), |
| | E.057608 (GDI2), E.058729 (RIOK2), E.071246 (VASH1), E.073050 (XRCC1), E.073350 |
| | (LLGL2), E.079246 (XRCC5), E.085733 (CTTN), E.091542 (ALKBH5), E.091732 |
| | (ZC3HC1), E.092621 (PHGDH), E.099899 (TRMT2A), E.099917 (MED15), E.101439 |
| | (CST3), E.103479 (RBL2), E.104611 (SH2D4A), E.105281 (SLC1A5), E.106392 |
| | (C1GALT1), E.107104 (KANK1), E.107798 (LIPA), E.108296 (CWC25), E.109572 |
| | (CLCN3), E.112110 (MRPL18), E.113790 (EHHADH), E.115648 (MLPH), E.117308 |
| | (GALE), E.117335 (CD46), E.118513 (MYB), E.118640 (VAMP8), E.119321 (FKBP15), |
| | E.122705 (CLTA), E.123983 (ACSL3), E.124232 (RBPJL), E.125901 (MRPS26), E.127399 |
| | (LRRC61), E.127554 (GFER), E.128708 (HAT1), E.129355 (CDKN2D), E.130340 (SNX9), |
| | E.130935 (NOL11), E.131771 (PPP1R1B), E.133863 (TEX15), E.134207 (SYT6), E.136935 |
| | (GOLGA1), E.141425 (RPRD1A), E.143374 (TARS2), E.143771 (CNIH4), E.146966 |
| | (DENND2A), E.148672 (GLUD1), E.150593 (PDCD4), E.153936 (HS2ST1), E.154099 |
| | (DNAAF1), E.156006 (NAT2), E.156282 (CLDN17), E.158545 (ZC3H18), E.158604 |
| | (TMED4), E.158813 (EDA), E.159184 (HOXB13), E.161267 (BDH1), E.163492 |
| | (CCDC141), E.163629 (PTPN13), E.164163 (ABCE1), E.164520 (RAET1E), E.165138 |
| | (ANKS6), E.165923 (AGBL2), E.166484 (MAPK7), E.166747 (AP1G1), E.166971 |
| | (AKTIP), E.167744 (NTF4), E.168071 (CCDC88B), E.169087 (HSPBAP1), E.170396 |
| | (ZNF804A), E.170445 (HARS), E.170632 (ARMC10), E.170743 (SYT9), E.171428 |
| | (NAT1), E.172346 (CSDC2), E.173805 (HAP1), E.175175 (PPM1E), E.175203 (DCTN2), |
| | E.177542 (SLC25A22), E.177679 (SRRM3), E.178828 (RNF186), E.182013 (PNMAL1), |
| | E.182054 (IDH2), E.182890 (GLUD2), E.184156 (KCNQ3), E.184697 (CLDN6), E.184735 |
| | (DDX53), E.184840 (TMED9), E.185219 (ZNF445), E.186198 (SLC51B), E.186205 |
| | (MOSC1; MARC1), E.189 143 (CLDN4), E.196700 (ZNF512B), E.196743 (GM2A), |
| | E.198087 (CD2AP), E.198951 (NAGA), E.204406 (MBD5), E.002330 (BAD), E.105404 |
| | (RABAC1), E.114127 (XRN1), E.117713 (ARID1A), E.123143 (PKN1), E.130764 |
| | (LRRC47), E.131773 (KHDRBS3), E.137806 (NDUFAF1), E.142864 (SERBP1), E.158747 |
| | (NBL1), E.175063 (UBE2C), E.178104 (PDE4DIP), E.186472 (PCLO), E.069956 (MAPK6), |
| | E.112941 (PAPD7), E.116604 (MEF2D), E.142875 (PRKACB), E.147133 (TAF1), |
| | E.157510 (AFAP1L1), E.006625 (GGCT), E.155980 (KIF5A), E.134444 (KIAA1468), |
| | E.107968 (MAP3K8), E.117592 (PRDX6), E.123154 (WDR83), E.135297 (MTO1), |
| | E.135829 (DHX9), E.149548 (CCDC15), E.152086 (TUBA3E), E.167553 (TUBA1C), |
| | E.169826 (CSGALNACT2), E.171121 (KCNMB3), E.198033 (TUBA3C), E.147724 |
| | (FAM135B), E.170854 (MINA), E.006695 (COX10), E.067369 (TP53BP1), E.089248 |
| | (ERP29), E.112096 (SOD2), E.138073 (PREB), E.146856 (AGBL3), E.159423 (ALDH4A1), |
| | E.171345 (KRT19), E.172345 (STARD5), E.111647 (UHRF1BP1L), E.117877 (CD3EAP), |
| | E.155714 (PDZD9), E.156603 (MED19), E.075886 (TUBA3D), E.167699 (GLOD4), |
| | E.121749 (TBC1D15), E.090861 (AARS), E.093010 (COMT), E.117676 (RPS6KA1), |
| | E.157502 (MUM1L1), E.159921 (GNE), E.169562 (GJB1), E.179776 (CDH5), E.071626 |
| | (DAZAP1), E.085224 (ATRX), E.116478 (HDAC1), E.117298 (ECE1), E.176171 (BNIP3), |
| | E.177425 (PAWR), E.179348 (GATA2), E.187840 (EIF4EBP1), E.033030 (ZCCHC8), |
| | E.049239 (H6PD), E.060688 (SNRNP40), E.075239 (ACAT1), E.095627 (TDRD1), |
| | E.109625 (CPZ), E.113719 (ERGIC1), E.126773 (C14orf135; PCNXL4), E.149218 |
| | (ENDOD1), E.162975 (KCNF1), E.183785 (TUBA8), E.198589 (LRBA), E.105379 (ETFB), |
| | E.011052 (NME2), E.011143 (MKS1), E.048544 (MRPS10), E.062485 (CS), E.114054 |
| | (PCCB), E.138587 (MNS1), E.155959 (VBP1), E.181222 (POLR2A), E.183723 (CMTM4), |
| | E.184661 (CDCA2), E.204316 (MRPL38), E.140694 (PARN), E.035141 (FAM136A), |
| | E.095485 (CWF19L1), E.115540 (MOB4), E.123595 (RAB9A), E.140678 (ITGAX), |
| | E.141258 (SGSM2), E.158941 (KIAA1967), E.169189 (NSMCE1), E.198431 (TXNRD1), |
| | E.016402 (IL20RA), E.112234 (FBXL4), E.125445 (MRPS7), E.128342 (LIF), E.164051 |
| | (CCDC51), E.175866 (BAIAP2), E.102780 (DGKH), E.203813 (HIST1H3H), E.198231 |
| | (DDX42), E.030582 (GRN), E.106049 (HIBADH), E.130810 (PPAN), E.132475 (H3F3B), |
| | E.158290 (CUL4B), E.166266 (CUL5), E.026559 (KCNG1), E.059122 (FLYWCH1), |
| | E.107897 (ACBD5), E.121068 (TBX2), E.125944 (HNRNPR), E.134308 (YWHAQ), |
| | E.137558 (PI15), E.137601 (NEK1), E.147548 (WHSC1L1), E.149182 (ARFGAP2), |
| | E.159658 (KIAA0494), E.165699 (TSC1), E.170927 (PKHD1), E.186575 (NF2), E.188021 |
| | (UBQLN2), E.167552 (TUBA1A), E.003756 (RBM5), E.134138 (MEIS2), E.008196 |
| | (TFAP2B), E.079313 (REXO1), E.089127 (OAS1), E.106078 (COBL), E.113645 (WWC1), |
| | E.116288 (PARK7), E.121940 (CLCC1), E.136280 (CCM2), E.141639 (MAPK4), E.147475 |
| | (ERLIN2), E.155660 (PDIA4), E.162298 (SYVN1), E.176978 (DPP7), E.176994 (SMCR8), |
| | E.178175 (ZNF366), E.196591 (HDAC2), E.127824 (TUBA4A), E.163932 (PRKCD), |
| | E.143375 (CGN), E.076864 (RAP1GAP), E.138772 (ANXA3), E.163041 (H3F3A), |
| | E.165813 (C10orf118), E.166337 (TAF10), E.178078 (STAP2), E.184007 (PTP4A2), |
| | E.167004 (PDIA3), E.039560 (RAI14), E.119636 (C14orf45), E.140374 (ETFA), E.143633 |
| | (C1orf131), E.144935 (TRPC1), E.156735 (BAG4), E.159348 (CYB5R1), E.170275 |
| | (CRTAP), E.172717 (FAM71D), E.172939 (OXSR1), E.176105 (YES1), E.078295 |
| | (ADCY2), E.119888 (EPCAM), E.141522 (ARHGDIA), E.184047 (DIABLO), E.109062 |
| | (SLC9A3R1), E.170037 (CNTROB), E.066557 (LRRC40), E.074964 (ARHGEF10L), |
| | E.078269 (SYNJ2), E.090013 (BLVRB), E.100142 (POLR2F), E.100399 (CHADL), |
| | E.104365 (IKBKB), E.111261 (MANSC1), E.111907 (TPD52L1), E.112578 (BYSL), |
| | E.121957 (GPSM2), E.122884 (P4HA1), E.124693 (HIST1H3B), E.126653 (NSRP1), |
| | E.130402 (ACTN4), E.138757 (G3BP2), E.150991 (UBC), E.164828 (SUN1), E.175216 |
| | (CKAP5), E.176155 (CCDC57), E.177459 (C8orf47), E.183856 (IQGAP3), E.185122 |
| | (HSF1), E.122952 (ZWINT), E.151093 (OXSM), E.067704 (IARS2), E.088899 (ProSAP- |
| | interacting protein 1), E.091483 (FH), E.114388 (NPRL2), E.114861 (FOXP1), E.135914 |
| | (HTR2B), E.197837 (HIST4H4), E.127720 (C12orf26; METTL25), E.123416 (TUBA1B), |
| | E.047410 (TPR), E.117748 (RPA2), E.133835 (HSD17B4), E.067248 (DHX29), E.121879 |
| | (PIK3CA), E.132589 (FLOT2), E.136750 (GAD2), E.160789 (LMNA), E.166329, E.170088 |
| | (TMEM192), E.175946 (KLHL38), E.178163 (ZNF518B), E.182217 (HIST2H4B), |
| | E.184470 (TXNRD2), E.110321 (EIF4G2), E.171861 (RNMTL1), E.065978 (YBX1), |
| | E.115738 (ID2), E.143294 (PRCC), E.158042 (MRPL17), E.169093 (ASMTL), E.090565 |
| | (RAB11FIP3), E.185591 (SP1), E.156304 (SCAF4), E.092978 (GPATCH2), E.100056 |
| | (DGCR14), E.100583 (SAMD15), E.105723 (GSK3A), E.107551 (RASSF4), E.107581 |
| | (EIF3A), E.107890 (ANKRD26), E.110104 (CCDC86), E.112584 (FAM120B), E.113580 |
| | (NR3C1), E.114491 (UMPS), E.137312 (FLOT1), E.137955 (RABGGTB), E.141994 |
| | (DUS3L), E.147044 (CASK), E.152818 (UTRN), E.180667 (YOD1), E.184916 (JAG2), |
| | E.196526 (AFAP1), E.198783 (ZNF830), E.108465 (CDK5RAP3), E.156515 (HK1), |
| | E.036448 (MYOM2), E.061918 (GUCY1B3), E.070785 (EIF2B3), E.116044 (NFE2L2), |
| | E.128311 (TST), E.131473 (ACLY), E.132716 (DCAF8), E.138363 (ATIC), E.166596 |
| | (WDR16), E.170027 (YWHAG), E.174021 (GNG5), E.203879 (GDI1), E.160049 (DFFA), |
| | E.010810 (FYN), E.051596 (THOC3), E.006453 (BAI1-associated protein 2-like 1), |
| | E.126945 (HNRNPH2), E.165695 (AK8), E.069869 (NEDD4), E.111801 (BTN3A3), |
| | E.112232 (KHDRBS2), E.128626 (MRPS12), E.129636 (ITFG1), E.137948 (BRDT), |
| | E.147257 (GPC3), E.155380 (SLC16A1), E.159692 (CTBP1), E.166833 (NAV2), E.172466 |
| | (ZNF24), E.175110 (MRPS22), E.176102 (CSTF3), E.179388 (EGR3), E.185359 (HGS), |
| | E.198001 (IRAK4), E.100603 (SNW1), E.162641 (AKNAD1), E.069712 (KIAA1107), |
| | E.073756 (PTGS2), E.077522 (ACTN2), E.101639 (CEP192), E.106633 (GCK), E.115241 |
| | (PPM1G), E.116649 (SRM), E.120370 (GORAB), E.124143 (ARHGAP40), E.127948 |
| | (POR), E.129315 (CCNT1), E.132646 (PCNA), E.135740 (SLC9A5), E.151726 (ACSL1), |
| | E.154380 (ENAH), E.157103 (SLC6A1), E.163930 (BAP1), E.164488 (DACT2), E.164754 |
| | (RAD21), E.175220 (ARHGAP1), E.180318 (ALX1), E.181234 (TMEM132C), E.197081 |
| | (IGF2R), E.092871 (RFFL), E.163644 (PPM1K), E.171723 (GPHN), E.108953 (YWHAE), |
| | E.072110 (ACTN1), E.077097 (TOP2B), E.090889 (KIF4A), E.114331 (ACAP2), E.114867 |
| | (EIF4G1), E.117593 (DARS2), E.118523 (CTGF), E.120915 (EPHX2), E.134759 (ELP2), |
| | E.138061 (CYP1B1), E.140743 (CDR2), E.151247 (EIF4E), E.152942 (RAD17), E.160685 |
| | (ZBTB7B), E.163923 (RPL39L), E.167642 (SPINT2), E.167996 (FTH1), E.185736 |
| | (ADARB2), E.198841 (KTI12), E.185860 (C1orf110), E.160226 (C21orf2), E.070814 |
| | (TCOF1), E.124749 (COL21A1), E.154639 (CXADR), E.065485 (PDIA5), E.023909 |
| | (GCLM), E.100714 (MTHFD1), E.108387 (SEPT4), E.160867 (FGFR4), E.134684 (YARS), |
| | E.123080 (CDKN2C), E.065548 (ZC3H15), E.116455 (WDR77), E.117448 (AKR1A1), |
| | E.100393 (EP300), E.138160 (KIF11), E.166263 (STXBP4), E.173473 (SMARCC1), |
| | E.124942 (AHNAK), E.174842 (GLMN), E.180198 (RCC1), E.185499 (MUC1), E.143947 |
| | (RPS27A), E.170315 (UBB), E.003402 (CFLAR), E.137055 (PLAA), E.142606 (MMEL1), |
| | E.147697 (GSDMC), E.163110 (PDLIM5), E.135842 (FAM129A), E.160691 (SHC1), |
| | E.197157 (SND1), E.029725 (RABEP1), E.127946 (HIP1), E.001036 (FUCA2), E.109846 |
| | (CRYAB), E.183831 (ANKRD45), E.189283 (FHIT), E.092820 (EZR), E.104067 (TJP1), |
| | E.120159 (C9orf82; CAAP1), E.154864 (PIEZO2), E.196975 (ANXA4), E.105220 (GPI), |
| | E.127914 (AKAP9), E.135870 (RC3H1), E.026508 (CD44), E.089154 (GCN1L1), E.100311 |
| | (PDGFB), E.119383 (PPP2R4), E.075624 (ACTB), E.177409 (SAMD9L), E.177731 (FLII), |
| | E.015676 (NUDCD3), E.146457 (WTAP), E.178950 (GAK), E.167110 (GOLGA2) |
| Prostate vesicle | LAMP2, ACPP, CTNNA1, HEBP2, ISOC2, HNRNPC, HNRNPM, TOMM22, TOM1, |
| | ACO2, KRT18, HSPA9, LMNB1, SPR, PPL, ALDH6A1, HNRNPA2B1, ATXN1, |
| | SMARCA4, ECHS1, PAICS, ILF3, PSME3, COX5B, RAB1A, SCARB2, HADH, ESD, |
| | SORD, ILF2, CALM2, ATP5A1, TGOLN2, ANGPTL4, ALCAM, KRT2, PC, NPM1, |
| | C1orf116, GPC6, ALDH1A3, HIST1H1C, XRCC6, HNRNPAB, PSAP, CDH1, SCAMP2, |
| | VASP, CD9, ATP1B3, HSD17B10, APAF1, EIF2C2, RAB5A, CFL2, FARSA, XPNPEP3, |
| | ENTPD4, APLP2, NUCB1, RAB3D, VEGFA, HPS3, TSNAXIP1, HNRNPL, PSMB7, |
| | GNA12, NONO, FOLH1, PRKAR2A, PHB, HIST3H3, MAP7, VCP, U2AF2, FUS, FKBP5, |
| | NDRG1, ATP1A3, NCL, RPL36, KRT8, C1GALT1C1, FASN, PTBP1, TXNDC16, |
| | DNAJC5, SLC37A2, HNRNPK, VDAC2, PRDX2, TALDO1, USP14, PSMD7, HSPE1, |
| | DNAJB1, YWHAZ, RAB3B, CORO1B, MDH2, HIST1H3A, LAMP1, STC2, DSTN, |
| | SLC20A2, ENPP4, WIZ, HSP90AB1, IDH3B, ECH1, C1QBP, SET, TNFSF18, ITGB7, |
| | SPOCK1, EIF4A2, CCT3, CLDN3, EEF2, LRRC57, RUVBL2, CLDN5, APPL2, TM9SF2, |
| | EIF4A3, DBI, DBF4B, SVIP, CD151, ALOX5, SLC9A3R2, RAB27B, DLG1, ARCN1, |
| | CHCHD3, RAB5B, RPS25, RPL10, DDAH1, HSP90B1, CTNNB1, PSMD2, PKP3, FLNB, |
| | EFTUD2, GLO1, PRKCSH, TMBIM1, SEC31A, TMED10, RPL14, MATR3, APEX1, |
| | B4GALT1, HNRNPA1, CPD, HSPA1A, CAPN1, CHRDL2, SPEN, SDF4, NAPA, |
| | SYNGR2, CHMP3, CNDP2, CCDC64B, SERINC5, VPS37C, DNPEP, CLDN7, KTN1, |
| | SERPINB6, ATP5B, CANX, AKT1, TTBK2, DDX1, DLD, LNPEP, LTBP2, LRPPRC, |
| | EPS8, AZGP1, VPS28, DHCR7, CIB1, DDX39B, HIST1H4B, UGDH, HSPD1, B2M, |
| | TOLLIP, CD276, CYCS, CUL3, GDI2, LLGL2, XRCC5, CTTN, PHGDH, CST3, RBL2, |
| | SLC1A5, CD46, VAMP8, CLTA, ACSL3, MRPS26, SNX9, GLUD1, TMED4, PTPN13, |
| | AP1G1, SYT9, DCTN2, IDH2, GLUD2, TMED9, CLDN4, GM2A, CD2AP, MBD5, |
| | SERBP1, NBL1, PRKACB, GGCT, PRDX6, DHX9, TUBA3E, TUBA1C, TUBA3C, |
| | ERP29, SOD2, KRT19, TUBA3D, AARS, COMT, MUM1L1, CDH5, ECE1, ACAT1, |
| | ENDOD1, TUBA8, ETFB, NME2, CS, VBP1, RAB9A, TXNRD1, LIF, BAIAP2, |
| | HIST1H3H, GRN, HIBADH, H3F3B, CUL4B, HNRNPR, YWHAQ, PKHD1, TUBA1A, |
| | PARK7, ERLIN2, PDIA4, TUBA4A, PRKCD, ANXA3, H3F3A, PTP4A2, PDIA3, ETFA, |
| | CYB5R1, CRTAP, OXSR1, YES1, EPCAM, ARHGDIA, DIABLO, SLC9A3R1, BLVRB, |
| | P4HA1, HIST1H3B, ACTN4, UBC, FH, HIST4H4, TUBA1B, HSD17B4, PIK3CA, FLOT2, |
| | LMNA, TMEM192, HIST2H4B, YBX1, EIF3A, FLOT1, UTRN, HK1, ACLY, ATIC, |
| | YWHAG, GNG5, GDI1, HNRNPH2, NEDD4, BTN3A3, SLC16A1, HGS, ACTN2, SRM, |
| | PCNA, ACSL1, RAD21, ARHGAP1, IGF2R, YWHAE, ACTN1, EIF4G1, EPHX2, EIF4E, |
| | FTH1, CXADR, MTHFD1, AKR1A1, STXBP4, AHNAK, MUC1, RPS27A, UBB, |
| | PDLIM5, FAM129A, SND1, FUCA2, CRYAB, EZR, TJP1, ANXA4, GPI, AKAP9, CD44, |
| | GCN1L1, ACTB, FLII, NUDCD3 |
| Prostate Cancer | EGFR, GLUD2, ANXA3, APLP2, BclG, Coiflin 2/cfL2, DCTN-50/DCTN2, DDAH1, |
| vesicles | ESD, FARSLA, GITRL, PRKCSH, SLC20A2, Synaptogyrin 2/SYNGR2, TM9SF2, |
| | Calnexin, TOMM22, NDRG1, RPL10, RPL14, USP14, VDAC2, LLGL2, CD63, CD81, |
| | uPAR/CD87, ADAM 9, BDKRB2, CCR5, CCT2 (TCP1-beta), PSMA, PSMA1, HSPB1, |
| | VAMP8, Rab1A, B4GALT1, Aspartyl Aminopeptidase/Dnpep, ATPase Na+/K+ beta |
| | 3/ATP1B3, BDNF, ATPB, beta 2 Microglobulin, Calmodulin 2/CALM2, CD9, XRCC5/ |
| | Ku80, SMARCA4, TOM1, Cytochrome C, Hsp10/HSPE1, COX2/PTGS2, Claudin 4/ |
| | CLDN4, Cytokeratin 8, Cortactin/CTTN, DBF4B/DRF1, ECH1, ECHS1, GOLPH2, ETS1, |
| | DIP13B/appl2, EZH2/KMT6, GSTP1, hK2/Kif2a, IQGAP1, KLK13, Lamp-2, GM2A, |
| | Hsp40/DNAJB1, HADH/HADHSC, Hsp90B, Nucleophosmin, p130/RBL2, PHGDH, |
| | RAB3B, ANXA1, PSMD7, PTBP1, Rab5a, SCARB2, Stanniocalcin 2/STC2, TGN46/ |
| | TGOLN2, TSNAXIP1, ANXA2, CD46, KLK14, IL1alpha, hnRNP C1 + C2, hnRNP A1, |
| | hnRNP A2B1, Claudin 5, CORO1B, Integrin beta 7, CD41, CD49d, CDH2, COX5b, IDH2, |
| | ME1, PhIP, ALDOA, EDNRB/EDN3, MTA1, NKX3-1, TMPRSS2, CD10, CD24, CDH1, |
| | ADAM10, B7H3, CD276, CHRDL2, SPOCK1, VEGFA, BCHE, CD151, CD166/ALCAM, |
| | CSE1L, GPC6, CXCR3, GAL3, GDF15, IGFBP-2, HGF, KLK12, ITGAL, KLK7, KLK9, |
| | MMP 2, MMP 25, MMP10, TNFR1, Notch 1, PAP - same as ACPP, PTPN13/PTPL1, |
| | seprase/FAP, TNFRI, TWEAK, VEGFR2, E-Cadherin, Hsp60, CLDN3—Claudin3, KLK6, |
| | KLK8, EDIL3 (del-1), APE1, MMP 1, MMP3, nAnS, PSP94/MSP/IGBF, PSAP, RPL19, |
| | SET, TGFB, TGM2, TIMP-1, TNFRII, MDH2, PKP1, Cystatin C, Trop2/TACSTD2, CCR2/ |
| | CD192, hnRNP M1-M4, CDKN1A, CGA, Cytokeratin 18, EpoR, GGPS1, FTL (light and |
| | heavy), GM-CSF, HSP90AA1, IDH3B, MKI67/Ki67, LTBP2, KLK1, KLK4, KLK5, LDH- |
| | A, Nav1.7/SCN9A, NRP1/CD304, PIP3/BPNT1, PKP3, CgA, PRDX2, SRVN, ATPase |
| | Na+/K+ alpha 3/ATP1A3, SLC3A2/CD98, U2AF2, TLR4 (CD284), TMPRSS1, TNFα, |
| | uPA, GloI, ALIX, PKM2, FABP5, CAV1, TLR9/CD289, ANXA4, PLEKHC1/Kindlin-2, |
| | CD71/TRFR, MBD5, SPEN/RBM15, LGALS8, SLC9A3R2, ENTPD4, ANGPTL4, p97/ |
| | VCP, TBX5, PTEN, Prohibitin, LSP1, HOXB13, DDX1, AKT1, ARF6, EZR, H3F3A, CIB1, |
| | Ku70 (XRCC6), KLK11, TMBIM6, SYT9, APAF1, CLDN7, MATR3, CD90/THY1, Tollip, |
| | NOTCH4, 14-3-3 zeta/beta, ATP5A1, DLG1, GRP94, FKBP5/FKBP51, LAMP1, |
| | LGALS3BP, GDI2, HSPA1A, NCL, KLK15, Cytokeratin basic, EDN-3, AGR2, KLK10, |
| | BRG1, FUS, Histone H4, hnRNP L, Catenin Alpha 1, hnRNP K (F45)*, MMP7*, DBI*, beta |
| | catenin, CTH, CTNND2, Ataxin 1, Proteasome 20S beta 7, ADE2, EZH2, GSTP1, Lamin |
| | B1, Coatomer Subunit Delta, ERAB, Mortalin, PKM2, IGFBP-3, CTNND1/delta 1-catenin/ |
| | p120-catenin, PKA R2, NONO, Sorbitol Dehydrogenase, Aconitase 2, VASP, Lipoamide |
| | Dehydrogenase, AP1G1, GOLPH2, ALDH6A1, AZGP1, Ago2, CNDP2, Nucleobindin-1, |
| | SerpinB6, RUVBL2, Proteasome 19S 10B, SH3PX1, SPR, Destrin, MDM4, FLNB, FASN, |
| | PSME |
| Prostate Cancer | 14-3-3 zeta/beta, Aconitase 2, ADAM 9, ADAM10, ADE2, AFM, Ago2, AGR2, AKT1, |
| vesicles | ALDH1A3, ALDH6A1, ALDOA, ALIX, ANGPTL4, ANXA1, ANXA2, ANXA3, ANXA3, |
| | ANXA4, AP1G1, APAF1, APE1, APLP2, APLP2, ARF6, Aspartyl Aminopeptidase/Dnpep, |
| | Ataxin 1, ATP5A1, ATPase Na+/K+ alpha 3/ATP1A3, ATPase Na+/K+ beta 3/ATP1B3, |
| | ATPase Na+/K+ beta 3/ATP1B3, ATPB, AZGP1, B4GALT1, B7H3, BCHE, BclG, |
| | BDKRB2, BDNF, BDNF, beta 2 Microglobulin, beta catenin, BRG1, CALM2, Calmodulin 2/ |
| | CALM2, Calnexin, Calpain 1, Catenin Alpha 1, CAV1, CCR2/CD192, CCR5, CCT2 |
| | (TCP1-beta), CD10, CD151, CD166/ALCAM, CD24, CD276, CD41, CD46, CD49d, CD63, |
| | CD71/TRFR, CD81, CD9, CD9, CD90/THY1, CDH1, CDH2, CDKN1A, CGA, CgA, |
| | CHRDL2, CIB1, CIB1, Claudin 4/CLDN4, Claudin 5, CLDN3, CLDN3—Claudin3, CLDN4, |
| | CLDN7, CNDP2, Coatomer Subunit Delta, Cofilin 2/cfL2, CORO1B, Cortactin/CTTN, |
| | COX2/PTGS2, COX5b, CSE1L, CTH, CTNND1/delta 1-catenin/p120-catenin, |
| | CTNND2, CXCR3, CYCS, Cystatin C, Cytochrome C, Cytokeratin 18, Cytokeratin 8, |
| | Cytokeratin basic, DBF4B/DRF1, DBI*, DCTN-50/DCTN2, DDAH1, DDAH1, DDX1, |
| | Destrin, DIP13B/appl2, DIP13B/appl2, DLG1, Dnpep, E-Cadherin, ECH1, ECHS1, |
| | ECHS1, EDIL3 (del-1), EDN-3, EDNRB/EDN3, EGFR, EIF4A3, ENTPD4, EpoR, EpoR, |
| | ERAB, ESD, ESD, ETS1, ETS1, ETS-2, EZH2, EZH2/KMT6, EZR, FABP5, FARSLA, |
| | FASN, FKBP5/FKBP51, FLNB, FTL (light and heavy), FUS, GAL3, gamma-catenin, |
| | GDF15, GDI2, GGPS1, GGPS1, GITRL, GloI, GLUD2, GM2A, GM-CSF, |
| | GOLM1/GOLPH2 Mab; clone 3B10, GOLPH2, GOLPH2, GPC6, GRP94, GSTP1, GSTP1, |
| | H3F3A, HADH/HADHSC, HGF, HIST1H3A, Histone H4, hK2/Kif2a, hnRNP A1, hnRNP |
| | A2B1, hnRNP C1 + C2, hnRNP K (F45)*, hnRNP L, hnRNP M1-M4, HOXB13, Hsp10/ |
| | HSPE1, Hsp40/DNAJB1, Hsp60, HSP90AA1, Hsp90B, HSPA1A, HSPB1, IDH2, IDH3B, |
| | IDH3B, IGFBP-2, IGFBP-3, IgG1, IgG2A, IgG2B, IL1alpha, IL1alpha, Integrin beta 7, |
| | IQGAP1, ITGAL, KLHL12/C3IP1, KLK1, KLK10, KLK11, KLK12, KLK13, KLK14, |
| | KLK15, KLK4, KLK5, KLK6, KLK7, KLK8, KLK9, Ku70 (XRCC6), Lamin B1, LAMP1, |
| | Lamp-2, LDH-A, LGALS3BP, LGALS8, Lipoamide Dehydrogenase, LLGL2, LSP1, LSP1, |
| | LTBP2, MATR3, MBD5, MDH2, MDM4, ME1, MKI67/Ki67, MMP 1, MMP 2, MMP 25, |
| | MMP10, MMP-14/MT1-MMP, MMP3, MMP7*, Mortalin, MTA1, nAnS, nAnS, |
| | Nav1.7/SCN9A, NCL, NDRG1, NKX3-1, NONO, Notch1, NOTCH4, NRP1/CD304, |
| | Nucleobindin-1, Nucleophosmin, p130/RBL2, p97/VCP, PAP - same as ACPP, PHGDH, |
| | PhIP, PIP3/BPNT1, PKA R2, PKM2, PKM2, PKP1, PKP3, PLEKHC1/Kindlin-2, PRDX2, |
| | PRKCSH, Prohibitin, Proteasome 19S 10B, Proteasome 20S beta 7, PSAP, PSMA, PSMA1, |
| | PSMA1, PSMD7, PSMD7, PSME3, PSP94/MSP/IGBF, PTBP1, PTEN, PTPN13/PTPL1, |
| | Rab1A, RAB3B, Rab5a, Rad51b, RPL10, RPL10, RPL14, RPL14, RPL19, RUVBL2, |
| | SCARB2, seprase/FAP, SerpinB6, SET, SH3PX1, SLC20A2, SLC3A2/CD98, SLC9A3R2, |
| | SMARCA4, Sorbitol Dehydrogenase, SPEN/RBM15, SPOCK1, SPR, SRVN, Stanniocalcin |
| | 2/STC2, STEAP1, Synaptogyrin 2/SYNGR2, Syndecan, SYNGR2, SYT9, TAF1B/ |
| | GRHL1, TBX5, TGFB, TGM2, TGN46/TGOLN2, TIMP-1, TLR3, TLR4 (CD284), TLR9/ |
| | CD289, TM9SF2, TMBIM6, TMPRSS1, TMPRSS2, TNFR1, TNFRI, TNFRII, TNFSF18/ |
| | GITRL, TNFα, TNFα, Tollip, TOM1, TOMM22, Trop2/TACSTD2, TSNAXIP1, TWEAK, |
| | U2AF2, uPA, uPAR/CD87, USP14, USP14, VAMP8, VASP, VDAC2, VEGFA, |
| | VEGFR1/FLT1, VEGFR2, VPS28, XRCC5/Ku80, XRCC5/Ku80 |
| Prostate Vesicles/ | EpCAM/TROP-1, HSA, Fibrinogen, GAPDH, Cholesterol Oxidase, MMP7, Complement |
| General Vesicles | Factor D/Adipsin, E-Cadherin, Transferrin Antibody, eNOS, IgM, CD9, Apolipoprotein B |
| | (Apo B), Ep-CAM, TBG, Kallekerin 3, IgA, IgG, Annexin V, IgG, Pyruvate Carboxylase, |
| | trypsin, AFP, TNF RI/TNFRSF1A, Aptamer CAR023, Aptamer CAR024, Aptamer CAR025, |
| | Aptamer CAR026 |
| Ribonucleoprotein | GW182, Ago2, miR-let-7a, miR-16, miR-22, miR-148a, miR-451, miR-92a, CD9, CD63, |
| complexes & | CD81 |
| vesicles | |
| Prostate Cancer | PCSA, Muc2, Adam10 |
| vesicles | |
| Prostate Cancer | Alkaline Phosphatase (AP), CD63, MyoD1, Neuron Specific Enolase, MAP1B, CNPase, |
| vesicles | Prohibitin, CD45RO, Heat Shock Protein 27, Collagen II, Laminin B1/b1, Gai1, CDw75, bcl- |
| | XL, Laminin-s, Ferritin, CD21, ADP-ribosylation Factor (ARF-6) |
| Prostate Cancer | CD56/NCAM-1, Heat Shock Protein 27/hsp27, CD45RO, MAP1B, MyoD1, |
| vesicles | CD45/T200/LCA, CD3zeta, Laminin-s, bcl-XL, Rad18, Gai1, Thymidylate Synthase, |
| | Alkaline Phosphatase (AP), CD63, MMP-16/MT3-MMP, Cyclin C, Neuron Specific |
| | Enolase, SIRP a1, Laminin B1/b1, Amyloid Beta (APP), SODD (Silencer of Death Domain), |
| | CDC37, Gab-1, E2F-2, CD6, Mast Cell Chymase, Gamma Glutamylcysteine Synthetase |
| | (GCS) |
| Prostate Cancer | EpCAM, MMP7, PCSA, BCNP, ADAM10, KLK2, SPDEF, CD81, MFGE8, IL-8 |
| vesicles | |
| Prostate Cancer | EpCAM, KLK2, PBP, SPDEF, SSX2, SSX4 |
| vesicles | |
| Prostate Cancer | ADAM-10, BCNP, CD9, EGFR, EpCam, IL1B, KLK2, MMP7, p53, PBP, PCSA, |
| vesicles | SERPINB3, SPDEF, SSX2, SSX4 |
| Androgen Receptor | GTF2F1, CTNNB1, PTEN, APPL1, GAPDH, CDC37, PNRC1, AES, UXT, RAN, PA2G4, |
| (AR) pathway | JUN, BAG1, UBE2I, HDAC1, COX5B, NCOR2, STUB1, HIPK3, PXN, NCOA4 |
| members in cMVs | |
| EGFR1 pathway | RALBP1, SH3BGRL, RBBP7, REPS1, SNRPD2, CEBPB, APPL1, MAP3K3, EEF1A1, |
| members in cMVs | GRB2, RAC1, SNCA, MAP2K3, CEBPA, CDC42, SH3KBP1, CBL, PTPN6, YWHAB, |
| | FOXO1, JAK1, KRT8, RALGDS, SMAD2, VAV1, NDUFA13, PRKCB1, MYC, JUN, |
| | RFXANK, HDAC1, HIST3H3, PEBP1, PXN, TNIP1, PKN2 |
| TNF-alpha | BCL3, SMARCE1, RPS11, CDC37, RPL6, RPL8, PAPOLA, PSMC1, CASP3, AKT2, |
| pathway members | MAP3K7IP2, POLR2L, TRADD, SMARCA4, HIST3H3, GNB2L1, PSMD1, PEBP1, |
| in cMVs | HSPB1, TNIP1, RPS13, ZFAND5, YWHAQ, COMMD1, COPS3, POLR1D, SMARCC2, |
| | MAP3K3, BIRC3, UBE2D2, HDAC2, CASP8, MCM7, PSMD7, YWHAG, NFKBIA, |
| | CAST, YWHAB, G3BP2, PSMD13, FBL, RELB, YWHAZ, SKP1, UBE2D3, PDCD2, |
| | HSP90AA1, HDAC1, KPNA2, RPL30, GTF2I, PFDN2 |
| Colorectal cancer | CD9, EGFR, NGAL, CD81, STEAP, CD24, A33, CD66E, EPHA2, Ferritin, GPR30, |
| | GPR110, MMP9, OPN, p53, TMEM211, TROP2, TGM2, TIMP, EGFR, DR3, UNC93A, |
| | MUC17, EpCAM, MUC1, MUC2, TSG101, CD63, B7H3 |
| Colorectal cancer | DR3, STEAP, epha2, TMEM211, unc93A, A33, CD24, NGAL, EpCam, MUC17, TROP2, |
| | TETS |
| Colorectal cancer | A33, AFP, ALIX, ALX4, ANCA, APC, ASCA, AURKA, AURKB, B7H3, BANK1, BCNP, |
| | BDNF, CA-19-9, CCSA-2, CCSA-3&4, CD10, CD24, CD44, CD63, CD66 CEA, CD66e |
| | CEA, CD81, CD9, CDA, C-Erb2, CRMP-2, CRP, CRTN, CXCL12, CYFRA21-1, DcR3, |
| | DLL4, DR3, EGFR, Epcam, EphA2, FASL, FRT, GAL3, GDF15, GPCR (GPR110), GPR30, |
| | GRO-1, HBD 1, HBD2, HNP1-3, IL-1B, IL8, IMP3, L1CAM, LAMN, MACC-1, |
| | MGC20553, MCP-1, M-CSF, MIC1, MIF, MMP7, MMP9, MS4A1, MUC1, MUC17, |
| | MUC2, Ncam, NGAL, NNMT, OPN, p53, PCSA, PDGFRB, PRL, PSMA, PSME3, Reg IV, |
| | SCRN1, Sept-9, SPARC, SPON2, SPR, SRVN, TFF3, TGM2, TIMP-1, TMEM211, TNF- |
| | alpha, TPA, TPS, Trail-R2, Trail-R4, TrKB, TROP2, Tsg 101, TWEAK, UNC93A, VEGFA |
| Colorectal cancer | miR 92, miR 21, miR 9, miR 491 |
| Colorectal cancer | miR-127-3p, miR-92a, miR-486-3p, miR-378 |
| Colorectal cancer | TMEM211, MUC1, CD24 and/or GPR110 (GPCR 110) |
| Colorectal cancer | hsa-miR-376c, hsa-miR-215, hsa-miR-652, hsa-miR-582-5p, hsa-miR-324-5p, hsa-miR- |
| | 1296, hsa-miR-28-5p, hsa-miR-190, hsa-miR-590-5p, hsa-miR-202, hsa-miR-195 |
| Colorectal cancer | A26C1A, A26C1B, A2M, ACAA2, ACE, ACOT7, ACP1, ACTA1, ACTA2, ACTB, |
| vesicle markers | ACTBL2, ACTBL3, ACTC1, ACTG1, ACTG2, ACTN1, ACTN2, ACTN4, ACTR3, |
| | ADAM10, ADSL, AGR2, AGR3, AGRN, AHCY, AHNAK, AKR1B10, ALB, ALDH16A1, |
| | ALDH1A1, ALDOA, ANXA1, ANXA11, ANXA2, ANXA2P2, ANXA4, ANXA5, ANXA6, |
| | AP2A1, AP2A2, APOA1, ARF1, ARF3, ARF4, ARF5, ARF6, ARHGDIA, ARPC3, |
| | ARPC5L, ARRDC1, ARVCF, ASCC3L1, ASNS, ATP1A1, ATP1A2, ATP1A3, ATP1B1, |
| | ATP4A, ATP5A1, ATP5B, ATP5I, ATP5L, ATP5O, ATP6AP2, B2M, BAIAP2, |
| | BAIAP2L1, BRI3BP, BSG, BUB3, C1orf58, C5orf32, CAD, CALM1, CALM2, CALM3, |
| | CAND1, CANX, CAPZA1, CBR1, CBR3, CCT2, CCT3, CCT4, CCT5, CCT6A, CCT7, |
| | CCT8, CD44, CD46, CD55, CD59, CD63, CD81, CD82, CD9, CDC42, CDH1, CDH17, |
| | CEACAM5, CFL1, CFL2, CHMP1A, CHMP2A, CHMP4B, CKB, CLDN3, CLDN4, |
| | CLDN7, CLIC1, CLIC4, CLSTN1, CLTC, CLTCL1, CLU, COL12A1, COPB1, COPB2, |
| | CORO1C, COX4I1, COX5B, CRYZ, CSPG4, CSRP1, CST3, CTNNA1, CTNNB1, |
| | CTNND1, CTTN, CYFIP1, DCD, DERA, DIP2A, DIP2B, DIP2C, DMBT1, DPEP1, DPP4, |
| | DYNC1H1, EDIL3, EEF1A1, EEF1A2, EEF1AL3, EEF1G, EEF2, EFNB1, EGFR, EHD1, |
| | EHD4, EIF3EIP, EIF3I, EIF4A1, EIF4A2, ENO1, ENO2, ENO3, EPHA2, EPHA5, EPHB1, |
| | EPHB2, EPHB3, EPHB4, EPPK1, ESD, EZR, F11R, F5, F7, FAM125A, FAM125B, |
| | FAM129B, FASLG, FASN, FAT, FCGBP, FER1L3, FKBP1A, FLNA, FLNB, FLOT1, |
| | FLOT2, G6PD, GAPDH, GARS, GCN1L1, GDI2, GK, GMDS, GNA13, GNAI2, GNAI3, |
| | GNAS, GNB1, GNB2, GNB2L1, GNB3, GNB4, GNG12, GOLGA7, GPA33, GPI, |
| | GPRC5A, GSN, GSTP1, H2AFJ, HADHA, hCG_1757335, HEPH, HIST1H2AB, |
| | HIST1H2AE, HIST1H2AJ, HIST1H2AK, HIST1H4A, HIST1H4B, HIST1H4C, HIST1H4D, |
| | HIST1H4E, HIST1H4F, HIST1H4H, HIST1H4I, HIST1H4J, HIST1H4K, HIST1H4L, |
| | HIST2H2AC, HIST2H4A, HIST2H4B, HIST3H2A, HIST4H4, HLA-A, HLA-A29.1, HLA- |
| | B, HLA-C, HLA-E, HLA-H, HNRNPA2B1, HNRNPH2, HPCAL1, HRAS, HSD17B4, |
| | HSP90AA1, HSP90AA2, HSP90AA4P, HSP90AB1, HSP90AB2P, HSP90AB3P, HSP90B1, |
| | HSPA1A, HSPA1B, HSPA1L, HSPA2, HSPA4, HSPA5, HSPA6, HSPA7, HSPA8, HSPA9, |
| | HSPD1, HSPE1, HSPG2, HYOU1, IDH1, IFITM1, IFITM2, IFITM3, IGH@, IGHG1, |
| | IGHG2, IGHG3, IGHG4, IGHM, IGHV4-31, IGK@, IGKC, IGKV1-5, IGKV2-24, IGKV3- |
| | 20, IGSF3, IGSF8, IQGAP1, IQGAP2, ITGA2, ITGA3, ITGA6, ITGAV, ITGB1, ITGB4, |
| | JUP, KIAA0174, KIAA1199, KPNB1, KRAS, KRT1, KRT10, KRT13, KRT14, KRT15, |
| | KRT16, KRT17, KRT18, KRT19, KRT2, KRT20, KRT24, KRT25, KRT27, KRT28, KRT3, |
| | KRT4, KRT5, KRT6A, KRT6B, KRT6C, KRT7, KRT75, KRT76, KRT77, KRT79, KRT8, |
| | KRT9, LAMA5, LAMP1, LDHA, LDHB, LFNG, LGALS3, LGALS3BP, LGALS4, LIMA1, |
| | LIN7A, LIN7C, LOC100128936, LOC100130553, LOC100133382, LOC100133739, |
| | LOC284889, LOC388524, LOC388720, LOC442497, LOC653269, LRP4, LRPPRC, |
| | LRSAM1, LSR, LYZ, MAN1A1, MAP4K4, MARCKS, MARCKSL1, METRNL, MFGE8, |
| | MICA, MIF, MINK1, MITD1, MMP7, MOBKL1A, MSN, MTCH2, MUC13, MYADM, |
| | MYH10, MYH11, MYH14, MYH9, MYL6, MYL6B, MYO1C, MYO1D, NARS, NCALD, |
| | NCSTN, NEDD4, NEDD4L, NME1, NME2, NOTCH1, NQO1, NRAS, P4HB, PCBP1, |
| | PCNA, PCSK9, PDCD6, PDCD6IP, PDIA3, PDXK, PEBP1, PFN1, PGK1, PHB, PHB2, |
| | PKM2, PLEC1, PLEKHB2, PLSCR3, PLXNA1, PLXNB2, PPIA, PPIB, PPP2R1A, PRDX1, |
| | PRDX2, PRDX3, PRDX5, PRDX6, PRKAR2A, PRKDC, PRSS23, PSMA2, PSMC6, |
| | PSMD11, PSMD3, PSME3, PTGFRN, PTPRF, PYGB, QPCT, QSOX1, RAB10, RAB11A, |
| | RAB11B, RAB13, RAB14, RAB15, RAB1A, RAB1B, RAB2A, RAB33B, RAB35, RAB43, |
| | RAB4B, RAB5A, RAB5B, RAB5C, RAB6A, RAB6B, RAB7A, RAB8A, RAB8B, RAC1, |
| | RAC3, RALA, RALB, RAN, RANP1, RAP1A, RAP1B, RAP2A, RAP2B, RAP2C, RDX, |
| | REG4, RHOA, RHOC, RHOG, ROCK2, RP11-631M21.2, RPL10A, RPL12, RPL6, RPL8, |
| | RPLP0, RPLP0-like, RPLP1, RPLP2, RPN1, RPS13, RPS14, RPS15A, RPS16, RPS18, |
| | RPS20, RPS21, RPS27A, RPS3, RPS4X, RPS4Y1, RPS4Y2, RPS7, RPS8, RPSA, |
| | RPSAP15, RRAS, RRAS2, RUVBL1, RUVBL2, S100A10, S100A11, S100A14, S100A16, |
| | S100A6, S100P, SDC1, SDC4, SDCBP, SDCBP2, SERINC1, SERINC5, SERPINA1, |
| | SERPINF1, SETD4, SFN, SLC12A2, SLC12A7, SLC16A1, SLC1A5, SLC25A4, SLC25A5, |
| | SLC25A6, SLC29A1, SLC2A1, SLC3A2, SLC44A1, SLC7A5, SLC9A3R1, SMPDL3B, |
| | SNAP23, SND1, SOD1, SORT1, SPTAN1, SPTBN1, SSBP1, SSR4, TACSTD1, TAGLN2, |
| | TBCA, TCEB1, TCP1, TF, TFRC, THBS1, TJP2, TKT, TMED2, TNFSF10, TNIK, |
| | TNKS1BP1, TNPO3, TOLLIP, TOMM22, TPI1, TPM1, TRAP1, TSG101, TSPAN1, |
| | TSPAN14, TSPAN15, TSPAN6, TSPAN8, TSTA3, TTYH3, TUBA1A, TUBA1B, |
| | TUBA1C, TUBA3C, TUBA3D, TUBA3E, TUBA4A, TUBA4B, TUBAS, TUBE, TUBB2A, |
| | TUBB2B, TUBB2C, TUBB3, TUBB4, TUBB4Q, TUBB6, TUFM, TXN, UBA1, UBA52, |
| | UBB, UBC, UBE2N, UBE2V2, UGDH, UQCRC2, VAMP1, VAMP3, VAMP8, VCP, VIL1, |
| | VPS25, VPS28, VPS35, VPS36, VPS37B, VPS37C, WDR1, YWHAB, YWHAE, YWHAG, |
| | YWHAH, YWHAQ, YWHAZ |
| Colorectal Cancer | hsa-miR-16, hsa-miR-25, hsa-miR-125b, hsa-miR-451, hsa-miR-200c, hsa-miR-140-3p, hsa- |
| | miR-658, hsa-miR-370, hsa-miR-1296, hsa-miR-636, hsa-miR-502-5p |
| Breast cancer | miR-21, miR-155, miR-206, miR-122a, miR-210, miR-21, miR-155, miR-206, miR-122a, |
| | miR-210, let-7, miR-10b, miR-125a, miR-125b, miR-145, miR-143, miR-145, miR-1b |
| Breast cancer | GAS5 |
| Breast cancer | ER, PR, HER2, MUC1, EGFR, KRAS, B-Raf, CYP2D6, hsp70, MART-1, TRP, HER2, |
| | hsp70, MART-1, TRP, HER2, ER, PR, Class III b-tubulin, VEGFA, ETV6-NTRK3, BCA- |
| | 225, hsp70, MART1, ER, VEGFA, Class III b-tubulin, HER2/neu (e.g., for Her2+ breast |
| | cancer), GPR30, ErbB4 (JM) isoform, MPR8, MISIIR, CD9, EphA2, EGFR, B7H3, PSM, |
| | PCSA, CD63, STEAP, CD81, ICAM1, A33, DR3, CD66e, MFG-E8, TROP-2, |
| | Mammaglobin, Hepsin, NPGP/NPFF2, PSCA, 5T4, NGAL, EpCam, neurokinin receptor-1 |
| | (NK-1 or NK-1R), NK-2, Pai-1, CD45, CD10, HER2/ERBB2, AGTR1, NPY1R, MUC1, |
| | ESA, CD133, GPR30, BCA225, CD24, CA15.3 (MUC1 secreted), CA27.29 (MUC1 |
| | secreted), NMDAR1, NMDAR2, MAGEA, CTAG1B, NY-ESO-1, SPB, SPC, NSE, PGP9.5, |
| | progesterone receptor (PR) or its isoform (PR(A) or PR(B)), P2RX7, NDUFB7, NSE, GAL3, |
| | osteopontin, CHI3L1, IC3b, mesothelin, SPA, AQP5, GPCR, hCEA-CAM, PTP IA-2, |
| | CABYR, TMEM211, ADAM28, UNC93A, MUC17, MUC2, IL10R-beta, BCMA, |
| | HVEM/TNFRSF14, Trappin-2, Elafin, ST2/IL1 R4, TNFRF14, CEACAM1, TPA1, LAMP, |
| | WF, WH1000, PECAM, BSA, TNFR |
| Breast cancer | CD9, MIS Rii, ER, CD63, MUC1, HER3, STAT3, VEGFA, BCA, CA125, CD24, EPCAM, |
| | ERB B4 |
| Breast cancer | CD10, NPGP/NPFF2, HER2/ERBB2, AGTR1, NPY1R, neurokinin receptor-1 (NK-1 or NK- |
| | 1R), NK-2, MUC1, ESA, CD133, GPR30, BCA225, CD24, CA15.3 (MUC1 secreted), |
| | CA27.29 (MUC1 secreted), NMDAR1, NMDAR2, MAGEA, CTAG1B, NY-ESO-1 |
| Breast cancer | SPB, SPC, NSE, PGP9.5, CD9, P2RX7, NDUFB7, NSE, GAL3, osteopontin, CHI3L1, |
| | EGFR, B7H3, IC3b, MUC1, mesothelin, SPA, PCSA, CD63, STEAP, AQP5, CD81, DR3, |
| | PSM, GPCR, EphA2, hCEA-CAM, PTP IA-2, CABYR, TMEM211, ADAM28, UNC93A, |
| | A33, CD24, CD10, NGAL, EpCam, MUC17, TROP-2, MUC2, IL10R-beta, BCMA, |
| | HVEM/TNFRSF14, Trappin-2 Elafin, ST2/IL1 R4, TNFRF14, CEACAM1, TPA1, LAMP, |
| | WF, WH1000, PECAM, BSA, TNFR |
| Breast cancer | BRCA, MUC-1, MUC 16, CD24, ErbB4, ErbB2 (HER2), ErbB3, HSP70, Mammaglobin, |
| | PR, PR(B), VEGFA |
| Breast cancer | CD9, HSP70, Gal3, MIS, EGFR, ER, ICB3, CD63, B7H4, MUC1, DLL4, CD81, ERB3, |
| | VEGF, BCA225, BRCA, CA125, CD174, CD24, ERB2, NGAL, GPR30, CYFRA21, CD31, |
| | cMET, MUC2, ERBB4 |
| Breast cancer | CD9, EphA2, EGFR, B7H3, PSMA, PCSA, CD63, STEAP, CD81, STEAP1, ICAM1 |
| | (CD54), PSMA, A33, DR3, CD66e, MFG-8e, TMEM211, TROP-2, EGFR, Mammoglobin, |
| | Hepsin, NPGP/NPFF2, PSCA, 5T4, NGAL, NK-2, EpCam, NK-1R, PSMA, 5T4, PAI-1, |
| | CD45 |
| Breast cancer | PGP9.5, CD9, HSP70, gal3-b2c10, EGFR, iC3b, PSMA, PCSA, CD63, MUC1, DLL4, |
| | CD81, B7-H3, HER 3 (ErbB3), MART-1, PSA, VEGF A, TIMP-1, GPCR GPR110, EphA2, |
| | MMP9, mmp7, TMEM211, UNC93a, BRCA, CA125 (MUC16), Mammaglobin, CD174 |
| | (Lewis y), CD66e CEA, CD24 c.sn3, C-erbB2, CD10, NGAL, epcam, CEA |
| | (carcinoembryonic Antigen), GPR30, CYFRA21-1, OPN, MUC17, hVEGFR2, MUC2, |
| | NCAM, ASPH, ErbB4, SPB, SPC, CD9, MS4A1, EphA2, MIS RII, HER2 (ErbB2), ER, PR |
| | (B), MRP8, CD63, B7H4, TGM2, CD81, DR3, STAT 3, MACC-1, TrKB, IL 6 Unc, OPG - |
| | 13, IL6R, EZH2, SCRN1, TWEAK, SERPINB3, CDAC1, BCA-225, DR3, A33, |
| | NPGP/NPFF2, TIMP1, BDNF, FRT, Ferritin heavy chain, seprase, p53, LDH, HSP, ost, p53, |
| | CXCL12, HAP, CRP, Gro-alpha, Tsg 101, GDF15 |
| Breast cancer | CD9, HSP70, Gal3, MIS (RII), EGFR, ER, ICB3, CD63, B7H4, MUC1, CD81, ERB3, |
| | MART1, STAT3, VEGF, BCA225, BRCA, CA125, CD174, CD24, ERB2, NGAL, GPR30, |
| | CYFRA21, CD31, cMET, MUC2, ERB4, TMEM211 |
| Breast Cancer | 5T4 (trophoblast), ADAM10, AGER/RAGE, APC, APP (β-amyloid), ASPH (A-10), B7H3 |
| | (CD276), BACE1, BAI3, BRCA1, BDNF, BIRC2, C1GALT1, CA125 (MUC16), |
| | Calmodulin 1, CCL2 (MCP-1), CD9, CD10, CD127 (IL7R), CD174, CD24, CD44, CD63, |
| | CD81, CEA, CRMP-2, CXCR3, CXCR4, CXCR6, CYFRA 21, derlin 1, DLL4, DPP6, E- |
| | CAD, EpCaM, EphA2 (H-77), ER(1) ESR1 α, ER(2) ESR2 β, Erb B4, Erbb2, erb3 (Erb-B3), |
| | PA2G4, FRT (FLT1), Gal3, GPR30 (G-coupled ER1), HAP1, HER3, HSP-27, HSP70, IC3b, |
| | IL8, insig, junction plakoglobin, Keratin 15, KRAS, Mammaglobin, MART1, MCT2, |
| | MFGE8, MMP9, MRP8, Muc1, MUC17, MUC2, NCAM, NG2 (CSPG4), Ngal, NHE-3, |
| | NT5E (CD73), ODC1, OPG, OPN, p53, PARK7, PCSA, PGP9.5 (PARK5), PR(B), PSA, |
| | PSMA, RAGE, STXBP4, Survivin, TFF3 (secreted), TIMP1, TIMP2, TMEM211, TRAF4 |
| | (scaffolding), TRAIL-R2 (death Receptor 5), TrkB, Tsg 101, UNC93a, VEGF A, VEGFR2, |
| | YB-1, VEGFR1, GCDPF-15 (PIP), BigH3 (TGFb1-induced protein), 5HT2B (serotonin |
| | receptor 2B), BRCA2, BACE 1, CDH1—cadherin |
| Breast Cancer | AK5.2, ATP6V1B1, CRABP1 |
| Breast Cancer | DST.3, GATA3, KRT81 |
| Breast Cancer | AK5.2, ATP6V1B1, CRABP1, DST.3, ELF5, GATA3, KRT81, LALBA, OXTR, RASL10A, |
| | SERHL, TFAP2A.1, TFAP2A.3, TFAP2C, VTCN1 |
| Breast Cancer | TRAP; Renal Cell Carcinoma; Filamin; 14.3.3, Pan; Prohibitin; c-fos; Ang-2; GSTmu; Ang- |
| | 1; FHIT; Rad51; Inhibin alpha; Cadherin-P; 14.3.3 gamma; p18INK4c; P504S; XRCC2; |
| | Caspase 5; CREB-Binding Protein; Estrogen Receptor; IL17; Claudin 2; Keratin 8; GAPDH; |
| | CD1; Keratin, LMW; Gamma Glutamylcysteine Synthetase(GCS)/Glutamate-cysteine |
| | Ligase; a-B-Crystallin; Pax-5; MMP-19; APC; IL-3; Keratin 8 (phospho-specific Ser73); |
| | TGF-beta 2; ITK; Oct-2/; DJ-1; B7-H2; Plasma Cell Marker; Rad18; Estriol; Chk1; Prolactin |
| | Receptor; Laminin Receptor; Histone H1; CD45RO; GnRH Receptor; IP10/CRG2; Actin, |
| | Muscle Specific; S100; Dystrophin; Tubulin-a; CD3zeta; CDC37; GABA a Receptor 1; |
| | MMP-7 (Matrilysin); Heregulin; Caspase 3; CD56/NCAM-1; Gastrin 1; SREBP-1 (Sterol |
| | Regulatory Element Binding Protein-1); MLH1; PGP9.5; Factor VIII Related Antigen; ADP- |
| | ribosylation Factor (ARF-6); MHC II (HLA-DR) Ia; Survivin; CD23; G-CSF; CD2; |
| | kDa Calretinin; Neuron Specific Enolase; CD165; Calponin; CD95/Fas; Urocortin; Heat Shock |
| | Protein 27/hsp27; Topo II beta; Insulin Receptor; Keratin 5/8; sm; Actin, skeletal muscle; |
| | CA19-9; GluR1; GRIP1; CD79a mb-1; TdT; HRP; CD94; CCK-8; Thymidine |
| | Phosphorylase; CD57; Alkaline Phosphatase (AP); CD59/MACIF/MIRL/Protectin; |
| | GLUT-1; alpha-1-antitrypsin; Presenillin; Mucin 3 (MUC3); pS2; 14-3-3 beta; MMP-13 |
| | (Collagenase-3); Fli-1; mGluRS; Mast Cell Chymase; Laminin B1/b1; Neurofilament |
| | (160 kDa); CNPase; Amylin Peptide; Gai1; CD6; alpha-1-antichymotrypsin; E2F-2; MyoD1 |
| Ductal carcinoma | Laminin B1/b1; E2F-2; TdT; Apolipoprotein D; Granulocyte; Alkaline Phosphatase (AP); |
| in situ (DCIS) | Heat Shock Protein 27/hsp27; CD95/Fas; pS2; Estriol; GLUT-1; Fibronectin; CD6; CCK-8; |
| | sm; Factor VIII Related Antigen; CD57; Plasminogen; CD71/Transferrin Receptor; Keratin |
| | 5/8; Thymidine Phosphorylase; CD45/T200/LCA; Epithelial Specific Antigen; Macrophage; |
| | CD10; MyoD1; Gai1; bcl-XL; hPL; Caspase 3; Actin, skeletal muscle; IP10/CRG2; GnRH |
| | Receptor; p35nck5a; ADP-ribosylation Factor (ARF-6); Cdk4 ; alpha-1-antitrypsin; IL17; |
| | Neuron Specific Enolase; CD56/NCAM-1; Prolactin Receptor; Cdk7; CD79a mb-1; Collagen |
| | IV; CD94; Myeloid Specific Marker; Keratin 10; Pax-5; IgM (m-Heavy Chain); CD45RO; |
| | CA19-9; Mucin 2; Glucagon; Mast Cell Chymase; MLH1; CD1; CNPase; Parkin; MHC II |
| | (HLA-DR) Ia; B7-H2; Chk1; Lambda Light Chain; MHC II (HLA-DP and DR); Myogenin; |
| | MMP-7 (Matrilysin); Topo II beta; CD53; Keratin 19; Rad18; Ret Oncoprotein; MHC II |
| | (HLA-DP); E3-binding protein (ARM1); Progesterone Receptor; Keratin 8; IgG; IgA; |
| | Tubulin; Insulin Receptor Substrate-1; Keratin 15; DR3; IL-3; Keratin 10/13; Cyclin D3; |
| | MHC I (HLA25 and HLA-Aw32); Calmodulin; Neurofilament (160 kDa) |
| Ductal carcinoma | Macrophage; Fibronectin; Granulocyte; Keratin 19; Cyclin D3; CD45/T200/LCA; EGFR; |
| in situ (DCIS) v. | Thrombospondin; CD81/TAPA-1; Ruv C; Plasminogen; Collagen IV; Laminin B1/b1; CD10; |
| other Breast cancer | TdT; Filamin; bcl-XL; 14.3.3 gamma; 14.3.3, Pan; p170; Apolipoprotein D; CD71/ |
| | Transferrin Receptor; FHIT |
| Breast cancer | 5HT2B, 5T4 (trophoblast), ACO2, ACSL3, ACTN4, ADAM10, AGR2, AGR3, ALCAM, |
| | ALDH6A1, ANGPTL4, ANO9, AP1G1, APC, APEX1, APLP2, APP (_-amyloid), ARCN1, |
| | ARHGAP35, ARL3, ASAH1, ASPH (A-10), ATP1B1, ATP1B3, ATP5I, ATP5O, ATXN1, |
| | B7H3, BACE1, BAI3, BAIAP2, BCA-200, BDNF, BigH3, BIRC2, BLVRB, BRCA, BST2, |
| | C1GALT1, C1GALT1C1, C20orf3, CA125, CACYBP, Calmodulin, CAPN1, CAPNS1, |
| | CCDC64B, CCL2 (MCP-1), CCT3, CD10(BD), CD127 (IL7R), CD174, CD24, CD44, |
| | CD80, CD86, CDH1, CDH5, CEA, CFL2, CHCHD3, CHMP3, CHRDL2, CIB1, CKAP4, |
| | COPA, COX5B, CRABP2, CRIP1, CRISPLD1, CRMP-2, CRTAP, CTLA4, CUL3, CXCR3, |
| | CXCR4, CXCR6, CYB5B, CYB5R1, CYCS, CYFRA 21, DBI, DDX23, DDX39B, derlin 1, |
| | DHCR7, DHX9, DLD, DLL4, DNAJB1, DPP6, DSTN, eCadherin, EEF1D, EEF2, EFTUD2, |
| | EIF4A2, EIF4A3, EpCaM, EphA2, ER(1) ESR1_, ER(2) ESR2_, Erb B4, Erb2, erb3 (Erb- |
| | B3?), ERLIN2, ESD, FARSA, FASN, FEN1, FKBP5, FLNB, FOXP3, FUS, Gal3, GCDPF- |
| | 15, GCNT2, GNA12, GNG5, GNPTG, GPC6, GPD2, GPER (GPR30), GSPT1, H3F3B, |
| | H3F3C, HADH, HAP1, HER3, HIST1H1C, HIST1H2AB, HIST1H3A, HIST1H3C, |
| | HIST1H3D, HIST1H3E, HIST1H3F, HIST1H3G, HIST1H3H, HIST1H3I, HIST1H3J, |
| | HIST2H2BF, HIST2H3A, HIST2H3C, HIST2H3D, HIST3H3, HMGB1, HNRNPA2B1, |
| | HNRNPAB, HNRNPC, HNRNPD, HNRNPH2, HNRNPK, HNRNPL, HNRNPM, |
| | HNRNPU, HPS3, HSP-27, HSP70, HSP90B1, HSPA1A, HSPA2, HSPA9, HSPE1, IC3b, |
| | IDE, IDH3B, IDO1, IFI30, IL1RL2, IL7, IL8, ILF2, ILF3, IQCG, ISOC2, IST1, ITGA7, |
| | ITGB7, junction plakoglobin, Keratin 15, KRAS, KRT19, KRT2, KRT7, KRT8, KRT9, |
| | KTN1, LAMP1, LMNA, LMNB1, LNPEP, LRPPRC, LRRC57, Mammaglobin, MAN1A1, |
| | MAN1A2, MART1, MATR3, MBD5, MCT2, MDH2, MFGE8, MFGE8, MGP, MMP9, |
| | MRP8, MUC1, MUC17, MUC2, MYO5B, MYOF, NAPA, NCAM, NCL, NG2 (CSPG4), |
| | Ngal, NHE-3, NME2, NONO, NPM1, NQO1, NT5E (CD73), ODC1, OPG, OPN (SC), OS9, |
| | p53, PACSIN3, PAICS, PARK7, PARVA, PC, PCNA, PCSA, PD-1, PD-L1, PD-L2, |
| | PGP9.5, PHB, PHB2, PIK3C2B, PKP3, PPL, PR(B)?, PRDX2, PRKCB, PRKCD, PRKDC, |
| | PSA, PSAP, PSMA, PSMB7, PSMD2, PSME3, PYCARD, RAB1A, RAB3D, RAB7A, |
| | RAGE, RBL2, RNPEP, RPL14, RPL27, RPL36, RPS25, RPS4X, RPS4Y1, RPS4Y2, |
| | RUVBL2, SET, SHMT2, SLAIN1, SLC39A14, SLC9A3R2, SMARCA4, SNRPD2, |
| | SNRPD3, SNX33, SNX9, SPEN, SPR, SQSTM1, SSBP1, ST3GAL1, STXBP4, SUB1, |
| | SUCLG2, Survivin, SYT9, TFF3 (secreted), TGOLN2, THBS1, TIMP1, TIMP2, TMED10, |
| | TMED4, TMED9, TMEM211, TOM1, TRAF4 (scaffolding), TRAIL-R2, TRAP1, TrkB, Tsg |
| | 101, TXNDC16, U2AF2, UEVLD, UFC1, UNC93a, USP14, VASP, VCP, VDAC1, VEGFA, |
| | VEGFR1, VEGFR2, VPS37C, WIZ, XRCC5, XRCC6, YB-1, YWHAZ |
| Lung cancer | Pgrmc1 (progesterone receptor membrane component l)/sigma-2 receptor, STEAP, EZH2 |
| Lung cancer | Prohibitin, CD23, Amylin Peptide, HRP, Rad51, Pax-5, Oct-3/, GLUT-1, PSCA, |
| | Thrombospondin, FHIT, a-B-Crystallin, LewisA, Vacular Endothelial Growth |
| | Factor(VEGF), Hepatocyte Factor Homologue-4, Flt-4, GluR6/7, Prostate Apoptosis |
| | Response Protein-4, GluR1, Fli-1, Urocortin, S100A4, 14-3-3 beta, P504S, HDAC1, PGP9.5, |
| | DJ-1, COX2, MMP-19, Actin, skeletal muscle, Claudin 3, Cadherin-P, Collagen IX, |
| | p27Kip1, Cathepsin D, CD30 (Reed-Sternberg Cell Marker), Ubiquitin, FSH-b, TrxR2, |
| | CCK-8, Cyclin C, CD138, TGF-beta 2, Adrenocorticotrophic Hormone, PPAR-gamma, Bcl- |
| | 6, GLUT-3, IGF-I, mRANKL, Fas-ligand, Filamin, Calretinin, O ct-1, Parathyroid Hormone, |
| | Claudin 5, Claudin 4, Raf-1 (Phospho-specific), CDC14A Phosphatase, Mitochondria, APC, |
| | Gastrin 1, Ku (p80), Gail, XPA, Maltose Binding Protein, Melanoma (gp100), |
| | Phosphotyrosine, Amyloid A, CXCR4/Fusin, Hepatic Nuclear Factor-36, Caspase 1, HPV |
| | 16-E7, Axonal Growth Cones, Lck, Ornithine Decarboxylase, Gamma Glutamylcysteine |
| | Synthetase(GCS)/Glutamate-cysteine Ligase, ERCC1, Calmodulin, Caspase 7 (Mch 3), |
| | CD137 (4-1BB), Nitric Oxide Synthase, brain (bNOS), E2F-2, IL-10R, L-Plastin, CD18, |
| | Vimentin, CD50/ICAM-3, Superoxide Dismutase, Adenovirus Type 5 E1A, PHAS-I, |
| | Progesterone Receptor (phospho-specific) - Serine 294, MHC II (HLA-DQ), XPG, ER Ca + 2 |
| | ATPase2, Laminin-s, E3 -binding protein (ARM1), CD45RO, CD1, Cdk2, MMP-10 |
| | (Stromilysin-2), sm, Surfactant Protein B (Pro), Apolipoprotein D, CD46, Keratin 8 |
| | (phospho-specific Ser73), PCNA, FLAP, CD20, Syk, LH, Keratin 19, ADP-ribosylation |
| | Factor (ARF-6), Int-2 Oncoprotein, Luciferase, AIF (Apoptosis Inducing Factor), Grb2, bcl- |
| | X, CD16, Paxillin, MHC II (HLA-DP and DR), B-Cell, p21WAF1, MHC II (HLA-DR), |
| | Tyrosinase, E2F-1, Pds1, Calponin, Notch, CD26/DPP IV, SV40 Large T Antigen, Ku |
| | (p70/p80), Perform, XPF, SIM Ag (SIMA-4D3), Cdk1/p34cdc2, Neuron Specific Enolase, b- |
| | 2-Microglobulin, DNA Polymerase Beta, Thyroid Hormone Receptor, Human, Alkaline |
| | Phosphatase (AP), Plasma Cell Marker, Heat Shock Protein 70/hsp70, TRP75/gp75, SRF |
| | (Serum Response Factor), Laminin B1/b1, Mast Cell Chymase, Caldesmon, CEA/CD66e, |
| | CD24, Retinoid X Receptor (hRXR), CD45/T200/LCA, Rabies Virus, Cytochrome c, DR3, |
| | bcl-XL, Fascin, CD71/Transferrin Receptor |
| Lung Cancer | miR-497 |
| Lung Cancer | Pgrmc1 |
| Ovarian Cancer | CA-125, CA 19-9, c-reactive protein, CD95(also called Fas, Fas antigen, Fas receptor, FasR, |
| | TNFRSF6, APT1 or APO-1), FAP-1, miR-200 microRNAs, EGFR, EGFRvIII, |
| | apolipoprotein AI, apolipoprotein CIII, myoglobin, tenascin C, MSH6, claudin-3, claudin-4, |
| | caveolin-1, coagulation factor III, CD9, CD36, CD37, CD53, CD63, CD81, CD136, CD147, |
| | Hsp70, Hsp90, Rab13, Desmocollin-1, EMP-2, CK7, CK20, GCDF15, CD82, Rab-5b, |
| | Annexin V, MFG-E8, HLA-DR. MiR-200 microRNAs (miR-200a, miR-200b, miR-200c), |
| | miR-141, miR-429, JNK, Jun |
| Prostate Cancer v | AQP2, BMP5, C16orf86, CXCL13, DST, ERCC1, GNAO1, KLHL5, MAP4K1, NELL2, |
| normal | PENK, PGF, POU3F1, PRSS21, SCML1, SEMG1, SMARCD3, SNAI2, TAF1C, TNNT3 |
| Prostate Cancer v | ADRB2, ARG2, C22orf32, CYorf14, EIF1AY, FEV, KLK2, KLK4, LRRC26, MAOA, |
| Breast Cancer | NLGN4Y, PNPLA7, PVRL3, SIM2, SLC30A4, SLC45A3, STX19, TRIM36, TRPM8 |
| Prostate Cancer v | ADRB2, BAIAP2L2, C19orf33, CDX1, CEACAM6, EEF1A2, ERN2, FAM110B, FOXA2, |
| Colorectal Cancer | KLK2, KLK4, LOC389816, LRRC26, MIPOL1, SLC45A3, SPDEF, TRIM31, TRIM36, |
| | ZNF613 |
| Prostate Cancer v | ASTN2, CAB39L, CRIP1, FAM110B, FEV, GSTP1, KLK2, KLK4, LOC389816, LRRC26, |
| Lung Cancer | MUC1, PNPLA7, SIM2, SLC45A3, SPDEF, TRIM36, TRPV6, ZNF613 |
| Prostate Cancer | miRs-26a + b, miR-15, miR-16, miR-195, miR-497, miR-424, miR-206, miR-342-5p, miR- |
| | 186, miR-1271, miR-600, miR-216b, miR-519 family, miR-203 |
| Integrins | ITGA1 (CD49a, VLA1), ITGA2 (CD49b, VLA2), ITGA3 (CD49c, VLA3), ITGA4 (CD49d, |
| | VLA4), ITGA5 (CD49e, VLA5), ITGA6 (CD49f, VLA6), ITGA7 (FLJ25220), ITGA8, |
| | ITGA9 (RLC), ITGA10, ITGA11 (HsT18964), ITGAD (CD11D, FLJ39841), ITGAE |
| | (CD103, HUMINAE), ITGAL (CD11a, LFA1A), ITGAM (CD11b, MAC-1), ITGAV |
| | (CD51, VNRA, MSK8), ITGAW, ITGAX (CD11c), ITGB1 (CD29, FNRB, MSK12, |
| | MDF20), ITGB2 (CD18, LFA-1, MAC-1, MFI7), ITGB3 (CD61, GP3A, GPIIIa), ITGB4 |
| | (CD104), ITGB5 (FLJ26658), ITGB6, ITGB7, ITGB8 |
| Glycoprotein | GpIa-IIa, GpIIb-IIIa, GpIIIb, GpIb, GpIX |
| Transcription | STAT3, EZH2, p53, MACC1, SPDEF, RUNX2, YB-1 |
| factors | |
| Kinases | AURKA, AURKB |
| Disease Markers | 6Ckine, Adiponectin, Adrenocorticotropic Hormone, Agouti-Related Protein, Aldose |
| | Reductase, Alpha-1-Antichymotrypsin, Alpha-1-Antitrypsin, Alpha-1-Microglobulin, Alpha- |
| | 2-Macroglobulin, Alpha-Fetoprotein, Amphiregulin, Angiogenin, Angiopoietin-2, |
| | Angiotensin-Converting Enzyme, Angiotensinogen, Annexin A1, Apolipoprotein A-I, |
| | Apolipoprotein A-II, Apolipoprotein A-IV, Apolipoprotein B, Apolipoprotein C-I, |
| | Apolipoprotein C-III, Apolipoprotein D, Apolipoprotein E, Apolipoprotein H, |
| | Apolipoprotein(a), AXL Receptor Tyrosine Kinase, B cell-activating Factor, B Lymphocyte |
| | Chemoattractant, Bcl-2-like protein 2, Beta-2-Microglobulin, Betacellulin, Bone |
| | Morphogenetic Protein 6, Brain-Derived Neurotrophic Factor, Calbindin, Calcitonin, Cancer |
| | Antigen 125, Cancer Antigen 15-3, Cancer Antigen 19-9, Cancer Antigen 72-4, |
| | Carcinoembryonic Antigen, Cathepsin D, CD 40 antigen, CD40 Ligand, CD5 Antigen-like, |
| | Cellular Fibronectin, Chemokine CC-4, Chromogranin-A, Ciliary Neurotrophic Factor, |
| | Clusterin, Collagen IV, Complement C3, Complement Factor H, Connective Tissue Growth |
| | Factor, Cortisol, C-Peptide, C-Reactive Protein, Creatine Kinase-MB, Cystatin-C, Endoglin, |
| | Endostatin, Endothelin-1, EN-RAGE, Eotaxin-1, Eotaxin-2, Eotaxin-3, Epidermal Growth |
| | Factor, Epiregulin, Epithelial cell adhesion molecule, Epithelial-Derived Neutrophil- |
| | Activating Protein 78, Erythropoietin, E-Selectin, Ezrin, Factor VII, Fas Ligand, FASLG |
| | Receptor, Fatty Acid-Binding Protein (adipocyte), Fatty Acid-Binding Protein (heart), Fatty |
| | Acid-Binding Protein (liver), Ferritin, Fetuin-A, Fibrinogen, Fibroblast Growth Factor 4, |
| | Fibroblast Growth Factor basic, Fibulin-1C, Follicle-Stimulating Hormone, Galectin-3, |
| | Gelsolin, Glucagon, Glucagon-like Peptide 1, Glucose-6-phosphate Isomerase, Glutamate- |
| | Cysteine Ligase Regulatory subunit, Glutathione S-Transferase alpha, Glutathione S- |
| | Transferase Mu 1, Granulocyte Colony-Stimulating Factor, Granulocyte-Macrophage |
| | Colony-Stimulating Factor, Growth Hormone, Growth-Regulated alpha protein, Haptoglobin, |
| | HE4, Heat Shock Protein 60, Heparin-Binding EGF-Like Growth Factor, Hepatocyte Growth |
| | Factor, Hepatocyte Growth Factor Receptor, Hepsin, Human Chorionic Gonadotropin beta, |
| | Human Epidermal Growth Factor Receptor 2, Immunoglobulin A, Immunoglobulin E, |
| | Immunoglobulin M, Insulin, Insulin-like Growth Factor I, Insulin-like Growth Factor- |
| | Binding Protein 1, Insulin-like Growth Factor-Binding Protein 2, Insulin-like Growth Factor- |
| | Binding Protein 3, Insulin-like Growth Factor Binding Protein 4, Insulin-like Growth Factor |
| | Binding Protein 5, Insulin-like Growth Factor Binding Protein 6, Intercellular Adhesion |
| | Molecule 1, Interferon gamma, Interferon gamma Induced Protein 10, Interferon-inducible T- |
| | cell alpha chemoattractant, Interleukin-1 alpha, Interleukin-1 beta, Interleukin-1 Receptor |
| | antagonist, Interleukin-2, Interleukin-2 Receptor alpha, Interleukin-3, Interleukin-4, |
| | Interleukin-5, Interleukin-6, Interleukin-6 Receptor, Interleukin-6 Receptor subunit beta, |
| | Interleukin-7, Interleukin-8, Interleukin-10, Interleukin-11, Interleukin-12 Subunit p40, |
| | Interleukin-12 Subunit p70, Interleukin-13, Interleukin-15, Interleukin-16, Interleukin-25, |
| | Kallikrein 5, Kallikrein-7, Kidney Injury Molecule-1, Lactoylglutathione lyase, Latency- |
| | Associated Peptide of Transforming Growth Factor beta 1, Lectin-Like Oxidized LDL |
| | Receptor 1, Leptin, Luteinizing Hormone, Lymphotactin, Macrophage Colony-Stimulating |
| | Factor 1, Macrophage Inflammatory Protein-1 alpha, Macrophage Inflammatory Protein-1 |
| | beta, Macrophage Inflammatory Protein-3 alpha, Macrophage inflammatory protein 3 beta, |
| | Macrophage Migration Inhibitory Factor, Macrophage-Derived Chemokine, Macrophage- |
| | Stimulating Protein, Malondialdehyde-Modified Low-Density Lipoprotein, Maspin, Matrix |
| | Metalloproteinase- 1, Matrix Metalloproteinase-2, Matrix Metalloproteinase-3, Matrix |
| | Metalloproteinase-7, Matrix Metalloproteinase-9, Matrix Metalloproteinase-9, Matrix |
| | Metalloproteinase-10, Mesothelin, MHC class I chain-related protein A, Monocyte |
| | Chemotactic Protein 1, Monocyte Chemotactic Protein 2, Monocyte Chemotactic Protein 3, |
| | Monocyte Chemotactic Protein 4, Monokine Induced by Gamma Interferon, Myeloid |
| | Progenitor Inhibitory Factor 1, Myeloperoxidase, Myoglobin, Nerve Growth Factor beta, |
| | Neuronal Cell Adhesion Molecule, Neuron-Specific Enolase, Neuropilin-1, Neutrophil |
| | Gelatinase-Associated Lipocalin, NT-proBNP, Nucleoside diphosphate kinase B, |
| | Osteopontin, Osteoprotegerin, Pancreatic Polypeptide, Pepsinogen I, Peptide YY, |
| | Peroxiredoxin-4, Phosphoserine Aminotransferase, Placenta Growth Factor, Plasminogen |
| | Activator Inhibitor 1, Platelet-Derived Growth Factor BB, Pregnancy-Associated Plasma |
| | Protein A, Progesterone, Proinsulin (inc. Total or Intact), Prolactin, Prostasin, Prostate- |
| | Specific Antigen (inc. Free PSA), Prostatic Acid Phosphatase, Protein S100-A4, Protein |
| | S100-A6, Pulmonary and Activation-Regulated Chemokine, Receptor for advanced |
| | glycosylation end products, Receptor tyrosine-protein kinase erbB-3, Resistin, S100 calcium- |
| | binding protein B, Secretin, Serotransferrin, Serum Amyloid P-Component, Serum Glutamic |
| | Oxaloacetic Transaminase, Sex Hormone-Binding Globulin, Sortilin, Squamous Cell |
| | Carcinoma Antigen-1, Stem Cell Factor, Stromal cell-derived Factor-1, Superoxide |
| | Dismutase 1 (soluble), T Lymphocyte-Secreted Protein I-309, Tamm-Horsfall Urinary |
| | Glycoprotein, T-Cell-Specific Protein RANTES, Tenascin-C, Testosterone, Tetranectin, |
| | Thrombomodulin, Thrombopoietin, Thrombospondin-1, Thyroglobulin, Thyroid-Stimulating |
| | Hormone, Thyroxine-Binding Globulin, Tissue Factor, Tissue Inhibitor of Metalloproteinases |
| | 1, Tissue type Plasminogen activator, TNF-Related Apoptosis-Inducing Ligand Receptor 3, |
| | Transforming Growth Factor alpha, Transforming Growth Factor beta-3, Transthyretin, |
| | Trefoil Factor 3, Tumor Necrosis Factor alpha, Tumor Necrosis Factor beta, Tumor Necrosis |
| | Factor Receptor I, Tumor necrosis Factor Receptor 2, Tyrosine kinase with Ig and EGF |
| | homology domains 2, Urokinase-type Plasminogen Activator, Urokinase-type plasminogen |
| | activator Receptor, Vascular Cell Adhesion Molecule-1, Vascular Endothelial Growth Factor, |
| | Vascular endothelial growth Factor B, Vascular Endothelial Growth Factor C, Vascular |
| | endothelial growth Factor D, Vascular Endothelial Growth Factor Receptor 1, Vascular |
| | Endothelial Growth Factor Receptor 2, Vascular endothelial growth Factor Receptor 3, |
| | Vitamin K-Dependent Protein S, Vitronectin, von Willebrand Factor, YKL-40 |
| Disease Markers | Adiponectin, Adrenocorticotropic Hormone, Agouti-Related Protein, Alpha-1- |
| | Antichymotrypsin, Alpha-1-Antitrypsin, Alpha-1-Microglobulin, Alpha-2-Macroglobulin, |
| | Alpha-Fetoprotein, Amphiregulin, Angiopoietin-2, Angiotensin-Converting Enzyme, |
| | Angiotensinogen, Apolipoprotein A-I, Apolipoprotein A-II, Apolipoprotein A-IV, |
| | Apolipoprotein B, Apolipoprotein C-I, Apolipoprotein C-III, Apolipoprotein D, |
| | Apolipoprotein E, Apolipoprotein H, Apolipoprotein(a), AXL Receptor Tyrosine Kinase, B |
| | Lymphocyte Chemoattractant, Beta-2-Microglobulin, Betacellulin, Bone Morphogenetic |
| | Protein 6, Brain-Derived Neurotrophic Factor, Calbindin, Calcitonin, Cancer Antigen 125, |
| | Cancer Antigen 19-9, Carcinoembryonic Antigen, CD 40 antigen, CD40 Ligand, CD5 |
| | Antigen-like, Chemokine CC-4, Chromogranin-A, Ciliary Neurotrophic Factor, Clusterin, |
| | Complement C3, Complement Factor H, Connective Tissue Growth Factor, Cortisol, C- |
| | Peptide, C-Reactive Protein, Creatine Kinase-MB, Cystatin-C, Endothelin-1, EN-RAGE, |
| | Eotaxin-1, Eotaxin-3, Epidermal Growth Factor, Epiregulin, Epithelial-Derived Neutrophil- |
| | Activating Protein 78, Erythropoietin, E-Selectin, Factor VII, Fas Ligand, FASLG Receptor, |
| | Fatty Acid-Binding Protein (heart), Ferritin, Fetuin-A, Fibrinogen, Fibroblast Growth Factor |
| | 4, Fibroblast Growth Factor basic, Follicle-Stimulating Hormone, Glucagon, Glucagon-like |
| | Peptide 1, Glutathione S-Transferase alpha, Granulocyte Colony-Stimulating Factor, |
| | Granulocyte-Macrophage Colony-Stimulating Factor, Growth Hormone, Growth-Regulated |
| | alpha protein, Haptoglobin, Heat Shock Protein 60, Heparin-Binding EGF-Like Growth |
| | Factor, Hepatocyte Growth Factor, Immunoglobulin A, Immunoglobulin E, Immunoglobulin |
| | M, Insulin, Insulin-like Growth Factor I, Insulin-like Growth Factor-Binding Protein 2, |
| | Intercellular Adhesion Molecule 1, Interferon gamma, Interferon gamma Induced Protein 10, |
| | Interleukin-1 alpha, Interleukin-1 beta, Interleukin-1 Receptor antagonist, Interleukin-2, |
| | Interleukin-3, Interleukin-4, Interleukin-5, Interleukin-6, Interleukin-6 Receptor, Interleukin- |
| | 7, Interleukin-8, Interleukin-10, Interleukin-11, Interleukin-12 Subunit p40, Interleukin-12 |
| | Subunit p70, Interleukin-13, Interleukin-15, Interleukin-16, Interleukin-25, Kidney Injury |
| | Molecule-1, Lectin-Like Oxidized LDL Receptor 1, Leptin, Luteinizing Hormone, |
| | Lymphotactin, Macrophage Colony-Stimulating Factor 1, Macrophage Inflammatory Protein- |
| | 1 alpha, Macrophage Inflammatory Protein-1 beta, Macrophage Inflammatory Protein-3 |
| | alpha, Macrophage Migration Inhibitory Factor, Macrophage-Derived Chemokine, |
| | Malondialdehyde-Modified Low-Density Lipoprotein, Matrix Metalloproteinase-1, Matrix |
| | Metalloproteinase-2, Matrix Metalloproteinase-3, Matrix Metalloproteinase-7, Matrix |
| | Metalloproteinase-9, Matrix Metalloproteinase-9, Matrix Metalloproteinase-10, Monocyte |
| | Chemotactic Protein 1, Monocyte Chemotactic Protein 2, Monocyte Chemotactic Protein 3, |
| | Monocyte Chemotactic Protein 4, Monokine Induced by Gamma Interferon, Myeloid |
| | Progenitor Inhibitory Factor 1, Myeloperoxidase, Myoglobin, Nerve Growth Factor beta, |
| | Neuronal Cell Adhesion Molecule, Neutrophil Gelatinase-Associated Lipocalin, NT-proBNP, |
| | Osteopontin, Pancreatic Polypeptide, Peptide YY, Placenta Growth Factor, Plasminogen |
| | Activator Inhibitor 1, Platelet-Derived Growth Factor BB, Pregnancy-Associated Plasma |
| | Protein A, Progesterone, Proinsulin (inc. Intact or Total), Prolactin, Prostate-Specific Antigen |
| | (inc. Free PSA), Prostatic Acid Phosphatase, Pulmonary and Activation-Regulated |
| | Chemokine, Receptor for advanced glycosylation end products, Resistin, S100 calcium- |
| | binding protein B, Secretin, Serotransferrin, Serum Amyloid P-Component, Serum Glutamic |
| | Oxaloacetic Transaminase, Sex Hormone-Binding Globulin, Sortilin, Stem Cell Factor, |
| | Superoxide Dismutase 1 (soluble), T Lymphocyte-Secreted Protein I-309, Tamm-Horsfall |
| | Urinary Glycoprotein, T-Cell-Specific Protein RANTES, Tenascin-C, Testosterone, |
| | Thrombomodulin, Thrombopoietin, Thrombospondin-1, Thyroid-Stimulating Hormone, |
| | Thyroxine-Binding Globulin, Tissue Factor, Tissue Inhibitor of Metalloproteinases 1, TNF- |
| | Related Apoptosis-Inducing Ligand Receptor 3, Transforming Growth Factor alpha, |
| | Transforming Growth Factor beta-3, Transthyretin, Trefoil Factor 3, Tumor Necrosis Factor |
| | alpha, Tumor Necrosis Factor beta, Tumor necrosis Factor Receptor 2, Vascular Cell |
| | Adhesion Molecule-1, Vascular Endothelial Growth Factor, Vitamin K-Dependent Protein S, |
| | Vitronectin, von Willebrand Factor |
| Oncology | 6Ckine, Aldose Reductase, Alpha-Fetoprotein, Amphiregulin, Angiogenin, Annexin A1, B |
| | cell-activating Factor, B Lymphocyte Chemoattractant, Bcl-2-like protein 2, Betacellulin, |
| | Cancer Antigen 125, Cancer Antigen 15-3, Cancer Antigen 19-9, Cancer Antigen 72-4, |
| | Carcinoembryonic Antigen, Cathepsin D, Cellular Fibronectin, Collagen IV, Endoglin, |
| | Endostatin, Eotaxin-2, Epidermal Growth Factor, Epiregulin, Epithelial cell adhesion |
| | molecule, Ezrin, Fatty Acid-Binding Protein (adipocyte), Fatty Acid-Binding Protein (liver), |
| | Fibroblast Growth Factor basic, Fibulin-1C, Galectin-3, Gelsolin, Glucose-6-phosphate |
| | Isomerase, Glutamate-Cysteine Ligase Regulatory subunit, Glutathione S-Transferase Mu 1, |
| | HE4, Heparin-Binding EGF-Like Growth Factor, Hepatocyte Growth Factor, Hepatocyte |
| | Growth Factor Receptor, Hepsin, Human Chorionic Gonadotropin beta, Human Epidermal |
| | Growth Factor Receptor 2, Insulin-like Growth Factor-Binding Protein 1, Insulin-like Growth |
| | Factor-Binding Protein 2, Insulin-like Growth Factor-Binding Protein 3, Insulin-like Growth |
| | Factor Binding Protein 4, Insulin-like Growth Factor Binding Protein 5, Insulin-like Growth |
| | Factor Binding Protein 6, Interferon gamma Induced Protein 10, Interferon-inducible T-cell |
| | alpha chemoattractant, Interleukin-2 Receptor alpha, Interleukin-6, Interleukin-6 Receptor |
| | subunit beta, Kallikrein 5, Kallikrein-7, Lactoylglutathione lyase, Latency-Associated Peptide |
| | of Transforming Growth Factor beta 1, Leptin, Macrophage inflammatory protein 3 beta, |
| | Macrophage Migration Inhibitory Factor, Macrophage-Stimulating Protein, Maspin, Matrix |
| | Metalloproteinase-2, Mesothelin, MHC class I chain-related protein A, Monocyte |
| | Chemotactic Protein 1, Monokine Induced by Gamma Interferon, Neuron-Specific Enolase, |
| | Neuropilin-1, Neutrophil Gelatinase-Associated Lipocalin, Nucleoside diphosphate kinase B, |
| | Osteopontin, Osteoprotegerin, Pepsinogen I, Peroxiredoxin-4, Phosphoserine |
| | Aminotransferase, Placenta Growth Factor, Platelet-Derived Growth Factor BB, Prostasin, |
| | Protein S100-A4, Protein S100-A6, Receptor tyrosine-protein kinase erbB-3, Squamous Cell |
| | Carcinoma Antigen-1, Stromal cell-derived Factor-1, Tenascin-C, Tetranectin, |
| | Thyroglobulin, Tissue type Plasminogen activator, Transforming Growth Factor alpha, |
| | Tumor Necrosis Factor Receptor I, Tyrosine kinase with Ig and EGF homology domains 2, |
| | Urokinase-type Plasminogen Activator, Urokinase-type plasminogen activator Receptor, |
| | Vascular Endothelial Growth Factor, Vascular endothelial growth Factor B, Vascular |
| | Endothelial Growth Factor C, Vascular endothelial growth Factor D, Vascular Endothelial |
| | Growth Factor Receptor 1, Vascular Endothelial Growth Factor Receptor 2, Vascular |
| | endothelial growth Factor Receptor 3, YKL-40 |
| Disease | Adiponectin, Alpha-1-Antitrypsin, Alpha-2-Macroglobulin, Alpha-Fetoprotein, |
| | Apolipoprotein A-I, Apolipoprotein C-III, Apolipoprotein H, Apolipoprotein(a), Beta-2- |
| | Microglobulin, Brain-Derived Neurotrophic Factor, Calcitonin, Cancer Antigen 125, Cancer |
| | Antigen 19-9, Carcinoembryonic Antigen, CD 40 antigen, CD40 Ligand, Complement C3, C- |
| | Reactive Protein, Creatine Kinase-MB, Endothelin-1, EN-RAGE, Eotaxin-1, Epidermal |
| | Growth Factor, Epithelial-Derived Neutrophil-Activating Protein 78, Erythropoietin, Factor |
| | VII, Fatty Acid-Binding Protein (heart), Ferritin, Fibrinogen, Fibroblast Growth Factor basic, |
| | Granulocyte Colony-Stimulating Factor, Granulocyte-Macrophage Colony-Stimulating |
| | Factor, Growth Hormone, Haptoglobin, Immunoglobulin A, Immunoglobulin E, |
| | Immunoglobulin M, Insulin, Insulin-like Growth Factor I, Intercellular Adhesion Molecule 1, |
| | Interferon gamma, Interleukin-1 alpha, Interleukin-1 beta, Interleukin-1 Receptor antagonist, |
| | Interleukin-2, Interleukin-3, Interleukin-4, Interleukin-5, Interleukin-6, Interleukin-7, |
| | Interleukin-8, Interleukin-10, Interleukin-12 Subunit p40, Interleukin-12 Subunit p70, |
| | Interleukin-13, Interleukin-15, Interleukin-16, Leptin, Lymphotactin, Macrophage |
| | Inflammatory Protein-1 alpha, Macrophage Inflammatory Protein-1 beta, Macrophage- |
| | Derived Chemokine, Matrix Metalloproteinase-2, Matrix Metalloproteinase-3, Matrix |
| | Metalloproteinase-9, Monocyte Chemotactic Protein 1, Myeloperoxidase, Myoglobin, |
| | Plasminogen Activator Inhibitor 1, Pregnancy-Associated Plasma Protein A, Prostate- |
| | Specific Antigen (inc. Free PSA), Prostatic Acid Phosphatase, Serum Amyloid P-Component, |
| | Serum Glutamic Oxaloacetic Transaminase, Sex Hormone-Binding Globulin, Stem Cell |
| | Factor, T-Cell- Specific Protein RANTES, Thrombopoietin, Thyroid-Stimulating Hormone, |
| | Thyroxine-Binding Globulin, Tissue Factor, Tissue Inhibitor of Metalloproteinases 1, Tumor |
| | Necrosis Factor alpha, Tumor Necrosis Factor beta, Tumor Necrosis Factor Receptor 2, |
| | Vascular Cell Adhesion Molecule-1, Vascular Endothelial Growth Factor, von Willebrand |
| | Factor |
| Neurological | Alpha-1-Antitrypsin, Apolipoprotein A-I, Apolipoprotein A-II, Apolipoprotein B, |
| | Apolipoprotein C-I, Apolipoprotein H, Beta-2-Microglobulin, Betacellulin, Brain-Derived |
| | Neurotrophic Factor, Calbindin, Cancer Antigen 125, Carcinoembryonic Antigen, CD5 |
| | Antigen-like, Complement C3, Connective Tissue Growth Factor, Cortisol, Endothelin-1, |
| | Epidermal Growth Factor Receptor, Ferritin, Fetuin-A, Follicle-Stimulating Hormone, |
| | Haptoglobin, Immunoglobulin A, Immunoglobulin M, Intercellular Adhesion Molecule 1, |
| | Interleukin-6 Receptor, Interleukin-7, Interleukin-10, Interleukin-11, Interleukin-17, Kidney |
| | Injury Molecule-1, Luteinizing Hormone, Macrophage-Derived Chemokine, Macrophage |
| | Migration Inhibitory Factor, Macrophage Inflammatory Protein-1 alpha, Matrix |
| | Metalloproteinase-2, Monocyte Chemotactic Protein 2, Peptide YY, Prolactin, Prostatic Acid |
| | Phosphatase, Serotransferrin, Serum Amyloid P-Component, Sortilin, Testosterone, |
| | Thrombopoietin, Thyroid-Stimulating Hormone, Tissue Inhibitor of Metalloproteinases 1, |
| | TNF-Related Apoptosis-Inducing Ligand Receptor 3, Tumor necrosis Factor Receptor 2, |
| | Vascular Endothelial Growth Factor, Vitronectin |
| Cardiovascular | Adiponectin, Apolipoprotein A-I, Apolipoprotein B, Apolipoprotein C-III, Apolipoprotein D, |
| | Apolipoprotein E, Apolipoprotein H, Apolipoprotein(a), Clusterin, C-Reactive Protein, |
| | Cystatin-C, EN-RAGE, E-Selectin, Fatty Acid-Binding Protein (heart), Ferritin, Fibrinogen, |
| | Haptoglobin, Immunoglobulin M, Intercellular Adhesion Molecule 1, Interleukin-6, |
| | Interleukin-8, Lectin-Like Oxidized LDL Receptor 1, Leptin, Macrophage Inflammatory |
| | Protein-1 alpha, Macrophage Inflammatory Protein-1 beta, Malondialdehyde-Modified Low- |
| | Density Lipoprotein, Matrix Metalloproteinase-1, Matrix Metalloproteinase-10, Matrix |
| | Metalloproteinase-2, Matrix Metalloproteinase-3, Matrix Metalloproteinase-7, Matrix |
| | Metalloproteinase-9, Monocyte Chemotactic Protein 1, Myeloperoxidase, Myoglobin, NT- |
| | proBNP, Osteopontin, Plasminogen Activator Inhibitor 1, P-Selectin, Receptor for advanced |
| | glycosylation end products, Serum Amyloid P-Component, Sex Hormone-Binding Globulin, |
| | T-Cell-Specific Protein RANTES, Thrombomodulin, Thyroxine-Binding Globulin, Tissue |
| | Inhibitor of Metalloproteinases 1, Tumor Necrosis Factor alpha, Tumor necrosis Factor |
| | Receptor 2, Vascular Cell Adhesion Molecule-1, von Willebrand Factor |
| Inflammatory | Alpha-1-Antitrypsin, Alpha-2-Macroglobulin, Beta-2-Microglobulin, Brain-Derived |
| | Neurotrophic Factor, Complement C3, C-Reactive Protein, Eotaxin-1, Factor VII, Ferritin, |
| | Fibrinogen, Granulocyte-Macrophage Colony-Stimulating Factor, Haptoglobin, Intercellular |
| | Adhesion Molecule 1, Interferon gamma, Interleukin-1 alpha, Interleukin-1 beta, Interleukin- |
| | 1 Receptor antagonist, Interleukin-2, Interleukin-3, Interleukin-4, Interleukin-5, Interleukin-6, |
| | Interleukin-7, Interleukin-8, Interleukin-10, Interleukin-12 Subunit p40, Interleukin-12 |
| | Subunit p70, Interleukin-15, Interleukin-17, Interleukin-23, Macrophage Inflammatory |
| | Protein-1 alpha, Macrophage Inflammatory Protein-1 beta, Matrix Metalloproteinase-2, |
| | Matrix Metalloproteinase-3, Matrix Metalloproteinase-9, Monocyte Chemotactic Protein 1, |
| | Stem Cell Factor, T-Cell-Specific Protein RANTES, Tissue Inhibitor of Metalloproteinases 1, |
| | Tumor Necrosis Factor alpha, Tumor Necrosis Factor beta, Tumor necrosis Factor Receptor |
| | 2, Vascular Cell Adhesion Molecule-1, Vascular Endothelial Growth Factor, Vitamin D- |
| | Binding Protein, von Willebrand Factor |
| Metabolic | Adiponectin, Adrenocorticotropic Hormone, Angiotensin-Converting Enzyme, |
| | Angiotensinogen, Complement C3 alpha des arg, Cortisol, Follicle-Stimulating Hormone, |
| | Galanin, Glucagon, Glucagon-like Peptide 1, Insulin, Insulin-like Growth Factor I, Leptin, |
| | Luteinizing Hormone, Pancreatic Polypeptide, Peptide YY, Progesterone, Prolactin, Resistin, |
| | Secretin, Testosterone |
| Kidney | Alpha-1-Microglobulin, Beta-2-Microglobulin, Calbindin, Clusterin, Connective Tissue |
| | Growth Factor, Creatinine, Cystatin-C, Glutathione S-Transferase alpha, Kidney Injury |
| | Molecule-1, Microalbumin, Neutrophil Gelatinase-Associated Lipocalin, Osteopontin, |
| | Tamm-Horsfall Urinary Glycoprotein, Tissue Inhibitor of Metalloproteinases 1, Trefoil |
| | Factor 3, Vascular Endothelial Growth Factor |
| Cytokines | Granulocyte-Macrophage Colony-Stimulating Factor, Interferon gamma, Interleukin-2, |
| | Interleukin-3, Interleukin-4, Interleukin-5, Interleukin-6, Interleukin-7, Interleukin-8, |
| | Interleukin-10, Macrophage Inflammatory Protein-1 alpha, Macrophage Inflammatory |
| | Protein-1 beta, Matrix Metalloproteinase-2, Monocyte Chemotactic Protein 1, Tumor |
| | Necrosis Factor alpha, Tumor Necrosis Factor beta, Brain-Derived Neurotrophic Factor, |
| | Eotaxin-1, Intercellular Adhesion Molecule 1, Interleukin-1 alpha, Interleukin-1 beta, |
| | Interleukin-1 Receptor antagonist, Interleukin-12 Subunit p40, Interleukin-12 Subunit p70, |
| | Interleukin-15, Interleukin-17, Interleukin-23, Matrix Metalloproteinase-3, Stem Cell Factor, |
| | Vascular Endothelial Growth Factor |
| Protein | 14.3.3 gamma, 14.3.3 (Pan), 14-3-3 beta, 6-Histidine, a-B-Crystallin, Acinus, Actin beta, |
| | Actin (Muscle Specific), Actin (Pan), Actin (skeletal muscle), Activin Receptor Type II, |
| | Adenovirus, Adenovirus Fiber, Adenovirus Type 2 E1A, Adenovirus Type 5 E1A, ADP- |
| | ribosylation Factor (ARF-6), Adrenocorticotrophic Hormone, AIF (Apoptosis Inducing |
| | Factor), Alkaline Phosphatase (AP), Alpha Fetoprotein (AFP), Alpha Lactalbumin, alpha-1- |
| | antichymotrypsin, alpha-1-antitrypsin, Amphiregulin, Amylin Peptide, Amyloid A, Amyloid |
| | A4 Protein Precursor, Amyloid Beta (APP), Androgen Receptor, Ang-1, Ang-2, APC, |
| | APC11, APC2, Apolipoprotein D, A-Raf, ARC, Ask1/MAPKKK5, ATM, Axonal Growth |
| | Cones, b Galactosidase, b-2-Microglobulin, B7-H2, BAG-1, Bak, Bax, B-Cell, B-cell Linker |
| | Protein (BLNK), Bcl10/CIPER/CLAP/mE10, bcl-2a, Bcl-6, bcl-X, bcl-XL, Bim (BOD), |
| | Biotin, Bonzo/STRL33/TYMSTR, Bovine Serum Albumin, BRCA2 (aa 1323-1346), |
| | BrdU, Bromodeoxyuridine (BrdU), CA125, CA19-9, c-Abl, Cadherin (Pan), Cadherin-E, |
| | Cadherin-P, Calcitonin, Calcium Pump ATPase, Caldesmon, Calmodulin, Calponin, |
| | Calretinin, Casein, Caspase 1, Caspase 2, Caspase 3, Caspase 5, Caspase 6 (Mch 2), Caspase |
| | 7 (Mch 3), Caspase 8 (FLICE), Caspase 9, Catenin alpha, Catenin beta, Catenin gamma, |
| | Cathepsin D, CCK-8, CD1, CD10, CD100/Leukocyte Semaphorin, CD105, CD106/VCAM, |
| | CD115/c-fms/CSF-1R/M-CSFR, CD137 (4-1BB), CD138, CD14, CD15, CD155/PVR (Polio |
| | Virus Receptor), CD16, CD165, CD18, CD1a, CD1b, CD2, CD20, CD21, CD23, CD231, |
| | CD24, CD25/IL-2 Receptor a, CD26/DPP IV, CD29, CD30 (Reed-Sternberg Cell Marker), |
| | CD32/Fcg Receptor II, CD35/CR1, CD36GPIIIb/GPIV, CD3zeta, CD4, CD40, CD42b, |
| | CD43, CD45/T200/LCA, CD45RB, CD45RO, CD46, CD5, CD50/ICAM-3, CD53, |
| | CD54/ICAM-1, CD56/NCAM-1, CD57, CD59/MACIF/MIRL/Protectin, CD6, CD61/ |
| | Platelet Glycoprotein IIIA, CD63, CD68, CD71/Transferrin Receptor, CD79a mb-1, CD79b, |
| | CD8, CD81/TAPA-1, CD84, CD9, CD94, CD95/Fas, CD98, CDC14A Phosphatase, |
| | CDC25C, CDC34, CDC37, CDC47, CDC6, cdh1, Cdk1/p34cdc2, Cdk2, Cdk3, Cdk4, Cdk5, |
| | Cdk7, Cdk8, CDw17, CDw60, CDw75, CDw78, CEA/CD66e, c-erbB-2/HER-2/neu Ab-1 |
| | (21N), c-erbB-4/HER-4, c-fos, Chk1, Chorionic Gonadotropin beta (hCG-beta), |
| | Chromogranin A, CIDE-A, CIDE-B, CITED 1, c-jun, Clathrin, claudin 11, Claudin 2, Claudin |
| | 3, Claudin 4, Claudin 5, CLAUDIN 7, Claudin-1, CNPase, Collagen II, Collagen IV, |
| | Collagen IX, Collagen VII, Connexin 43, COX2, CREB, CREB-Binding Protein, |
| | Cryptococcus neoformans, c-Src, Cullin-1 (CUL-1), Cullin-2 (CUL-2), Cullin-3 (CUL-3), |
| | CXCR4/Fusin, Cyclin B1, Cyclin C, Cyclin D1, Cyclin D3, Cyclin E, Cyclin E2, Cystic |
| | Fibrosis Transmembrane Regulator, Cytochrome c, D4-GDI, Daxx, DcR1, DcR2/TRAIL- |
| | R4/TRUNDD, Desmin, DFF40 (DNA Fragmentation Factor 40)/CAD, DFF45/ICAD, |
| | DJ-1, DNA Ligase I, DNA Polymerase Beta, DNA Polymerase Gamma, DNA Primase (p49), |
| | DNA Primase (p58), DNA-PKcs, DP-2, DR3, DR5, Dysferlin, Dystrophin, E2F-1, E2F-2, |
| | E2F-3, E2F-4, E2F-5, E3-binding protein (ARM1), EGFR, EMA/CA15-3/MUC-1, |
| | Endostatin, Epithelial Membrane Antigen (EMA/CA15-3/MUC-1), Epithelial Specific |
| | Antigen, ER beta, ER Ca + 2 ATPase2, ERCC1, Erk1, ERK2, Estradiol, Estriol, Estrogen |
| | Receptor, Exol, Ezrin/p81/80K/Cytovillin, F.VIII/VWF, Factor VIII Related Antigen, FADD |
| | (FAS-Associated death domain-containing protein), Fascin, Fas-ligand, Ferritin, FGF-1, |
| | FGF-2, FHIT, Fibrillin-1, Fibronectin, Filaggrin, Filamin, FITC, Fli-1, FLIP, Flk-1/KDR/ |
| | VEGFR2, Flt-1/VEGFR1, Flt-4, Fra2, FSH, FSH-b, Fyn, Ga0, Gab-1, GABA a Receptor 1, |
| | GAD65, Gai1, Gamma Glutamyl Transferase (gGT), Gamma Glutamylcysteine |
| | Synthetase(GCS)/Glutamate-cysteine Ligase, GAPDH, Gastrin 1, GCDFP-15, G-CSF, |
| | GFAP, Glicentin, Glucagon, Glucose-Regulated Protein 94, GluR 2/3, GluR1, GluR4, |
| | GluR6/7, GLUT-1, GLUT-3, Glycogen Synthase Kinase 3b (GSK3b), Glycophorin A, GM- |
| | CSF, GnRH Receptor, Golgi Complex, Granulocyte, Granzyme B, Grb2, Green Fluorescent |
| | Protein (GFP), GRIP1, Growth Hormone (hGH), GSK-3, GST, GSTmu, H. Pylori, HDAC1, |
| | HDJ-2/DNAJ, Heat Shock Factor 1, Heat Shock Factor 2, Heat Shock Protein 27/hsp27, Heat |
| | Shock Protein 60/hsp60, Heat Shock Protein 70/hsp70, Heat Shock Protein 75/hsp75, Heat |
| | Shock Protein 90a/hsp86, Heat Shock Protein 90b/hsp84, Helicobacter pylori, Heparan |
| | Sulfate Proteoglycan, Hepatic Nuclear Factor-3B, Hepatocyte, Hepatocyte Factor |
| | Homologue-4, Hepatocyte Growth Factor, Heregulin, HIF-1a, Histone H1, hPL, HPV 16, |
| | HPV 16-E7, HRP, Human Sodium Iodide Symporter (hNIS), I-FLICE/CASPER, IFN |
| | gamma, IgA, IGF-1R, IGF-I, IgG, IgM (m-Heavy Chain), I-Kappa-B Kinase b (IKKb), IL-1 |
| | alpha, IL-1 beta, IL-10, IL-10R, IL17, IL-2, IL-3, IL-30, IL-4, IL-5, IL-6, IL-8, Inhibin alpha, |
| | Insulin, Insulin Receptor, Insulin Receptor Substrate-1, Int-2 Oncoprotein, Integrin beta5, |
| | Interferon-a(II), Interferon-g, Involucrin, IP10/CRG2, IPO-38 Proliferation Marker, IRAK, |
| | ITK, JNK Activating kinase (JKK1), Kappa Light Chain, Keratin 10, Keratin 10/13, Keratin |
| | 14, Keratin 15, Keratin 16, Keratin 18, Keratin 19, Keratin 20, Keratin 5/6/18, Keratin 5/8, |
| | Keratin 8, Keratin 8 (phospho-specific Ser73), Keratin 8/18, Keratin (LMW), Keratin (Multi), |
| | Keratin (Pan), Ki67, Ku (p70/p80), Ku (p80), L1 Cell Adhesion Molecule, Lambda Light |
| | Chain, Laminin B1/b1, Laminin B2/gl, Laminin Receptor, Laminin-s, Lck, Lck (p56lck), |
| | Leukotriene (C4, D4, E4), LewisA, LewisB, LH, L-Plastin, LRP/MVP, Luciferase, |
| | Macrophage, MADD, MAGE-1, Maltose Binding Protein, MAP1B, MAP2a, b, MART- |
| | 1/Melan-A, Mast Cell Chymase, Mcl-1, MCM2, MCM5, MDM2, Medroxyprogesterone |
| | Acetate (MPA), Mek1, Mek2, Mek6, Mekk-1, Melanoma (gp100), mGluR1, mGluR5, |
| | MGMT, MHC I (HLA25 and HLA-Aw32), MHC I (HLA-A), MHC I (HLA-A, B, C), MHC I |
| | (HLA-B), MHC II (HLA-DP and DR), MHC II (HLA-DP), MHC II (HLA-DQ), MHC II |
| | (HLA-DR), MHC II (HLA-DR) Ia, Microphthalmia, Milk Fat Globule Membrane Protein, |
| | Mitochondria, MLH1, MMP-1 (Collagenase-I), MMP-10 (Stromilysin-2), MMP-11 |
| | (Stromelysin-3), MMP-13 (Collagenase-3), MMP-14/MT1-MMP, MMP-15/MT2-MMP, |
| | MMP-16/MT3-MMP, MMP-19, MMP-2 (72 kDa Collagenase IV), MMP-23, MMP-7 |
| | (Matrilysin), MMP-9 (92 kDa Collagenase IV), Moesin, mRANKL, Muc-1, Mucin 2, Mucin 3 |
| | (MUC3), Mucin 5AC, MyD88, Myelin/Oligodendrocyte, Myeloid Specific Marker, |
| | Myeloperoxidase, MyoD1, Myogenin, Myoglobin, Myosin Smooth Muscle Heavy Chain, |
| | Nck, Negative Control for Mouse IgG1, Negative Control for Mouse IgG2a, Negative |
| | Control for Mouse IgG3, Negative Control for Mouse IgM, Negative Control for Rabbit IgG, |
| | Neurofilament, Neurofilament (160 kDa), Neurofilament (200 kDa), Neurofilament (68 kDa), |
| | Neuron Specific Enolase, Neutrophil Elastase, NF kappa B/p50, NF kappa B/p65 (Rel A), |
| | NGF-Receptor (p75NGFR), brain Nitric Oxide Synthase (bNOS), endothelial Nitric Oxide |
| | Synthase (eNOS), nm23, NOS-i, NOS-u, Notch, Nucleophosmin (NPM), NuMA, O ct-1, |
| | Oct-2/, Oct-3/, Ornithine Decarboxylase, Osteopontin, p130, p130cas, p14ARF, p15INK4b, |
| | p16INK4a, p170, p170/MDR-1, p18INK4c, p19ARF, p19Skp1, p21WAF1, p27Kip1, p300/ |
| | CBP, p35nck5a, P504S, p53, p57Kip2 Ab-7, p63 (p53 Family Member), p73, p73a, p73a/b, |
| | p95VAV, Parathyroid Hormone, Parathyroid Hormone Receptor Type 1, Parkin, PARP, |
| | PARP (Poly ADP-Ribose Polymerase), Pax-5, Paxillin, PCNA, PCTAIRE2, PDGF, PDGFR |
| | alpha, PDGFR beta, Pds1, Perform, PGP9.5, PHAS-I, PHAS-II, Phospho-Ser/Thr/Tyr, |
| | Phosphotyrosine, PLAP, Plasma Cell Marker, Plasminogen, PLC gamma 1, PMP-22, |
| | Pneumocystis jiroveci, PPAR-gamma, PR3 (Proteinase 3), Presenillin, Progesterone, |
| | Progesterone Receptor, Progesterone Receptor (phospho-specific) - Serine 190, Progesterone |
| | Receptor (phospho-specific) - Serine 294, Prohibitin, Prolactin, Prolactin Receptor, Prostate |
| | Apoptosis Response Protein-4, Prostate Specific Acid Phosphatase, Prostate Specific |
| | Antigen, pS2, PSCA, Rabies Virus, RAD1, Rad51, Raf1, Raf-1 (Phospho-specific), RAIDD, |
| | Ras, Rad18, Renal Cell Carcinoma, Ret Oncoprotein, Retinoblastoma, Retinoblastoma (Rb) |
| | (Phospho-specific Serine608), Retinoic Acid Receptor (b), Retinoid X Receptor (hRXR), |
| | Retinol Binding Protein, Rhodopsin (Opsin), ROC, RPA/p32, RPA/p70, Ruv A, Ruv B, Ruv |
| | C, S100, S100A4, S100A6, SHP-1, SIM Ag (SIMA-4D3), SIRP a1, sm, SODD (Silencer of |
| | Death Domain), Somatostatin Receptor-I, SRC1 (Steroid Receptor Coactivator-1) Ab-1, |
| | SREBP-1 (Sterol Regulatory Element Binding Protein-1), SRF (Serum Response Factor), |
| | Stat-1, Stat3, Stat5, Stat5a, Stat5b, Stat6, Streptavidin, Superoxide Dismutase, Surfactant |
| | Protein A, Surfactant Protein B, Surfactant Protein B (Pro), Survivin, SV40 Large T Antigen, |
| | Syk, Synaptophysin, Synuclein, Synuclein beta, Synuclein pan, TACE (TNF-alpha |
| | converting enzyme)/ADAM17, TAG-72, tau, TdT, Tenascin, Testosterone, TGF beta 3, |
| | TGF-beta 2, Thomsen-Friedenreich Antigen, Thrombospondin, Thymidine Phosphorylase, |
| | Thymidylate Synthase, Thymine Glycols, Thyroglobulin, Thyroid Hormone Receptor beta, |
| | Thyroid Hormone Receptor, Thyroid Stimulating Hormone (TSH), TID-1, TIMP-1, TIMP-2, |
| | TNF alpha, TNFa, TNR-R2, Topo II beta, Topoisomerase IIa, Toxoplasma Gondii, TR2, |
| | TRADD, Transforming Growth Factor a, Transglutaminase II, TRAP, Tropomyosin, TRP75/ |
| | gp75, TrxR2, TTF-1, Tubulin, Tubulin-a, Tubulin-b, Tyrosinase, Ubiquitin, UCP3, uPA, |
| | Urocortin, Vacular Endothelial Growth Factor(VEGF), Vimentin, Vinculin, Vitamin D |
| | Receptor (VDR), von Hippel-Lindau Protein, Wnt-1, Xanthine Oxidase, XPA, XPF, XPG, |
| | XRCC1, XRCC2, ZAP-70, Zip kinase |
| Known Cancer | ABL1, ABL2, ACSL3, AF15Q14, AF1Q, AF3p21, AF5q31, AKAP9, AKT1, AKT2, |
| Genes | ALDH2, ALK, ALO17, APC, ARHGEF12, ARHH, ARID1A, ARID2, ARNT, ASPSCR1, |
| | ASXL1, ATF1, ATIC, ATM, ATRX, BAP1, BCL10, BCL11A, BCL11B, BCL2, BCL3, |
| | BCL5, BCL6, BCL7A, BCL9, BCOR, BCR, BHD, BIRC3, BLM, BMPR1A, BRAF, |
| | BRCA1, BRCA2, BRD3, BRD4, BRIP1, BTG1, BUB1B, C12orf9, C15orf21, C15orf55, |
| | C16orf75, CANT1, CARD11, CARS, CBFA2T1, CBFA2T3, CBFB, CBL, CBLB, CBLC, |
| | CCNB1IP1, CCND1, CCND2, CCND3, CCNE1, CD273, CD274, CD74, CD79A, CD79B, |
| | CDH1, CDH11, CDK12, CDK4, CDK6, CDKN2A, CDKN2a(p14), CDKN2C, CDX2, |
| | CEBPA, CEP1, CHCHD7, CHEK2, CHIC2, CHN1, CIC, CIITA, CLTC, CLTCL1, |
| | CMKOR1, COL1A1, COPEB, COX6C, CREB1, CREB3L1, CREB3L2, CREBBP, CRLF2, |
| | CRTC3, CTNNB1, CYLD, D10S170, DAXX, DDB2, DDIT3, DDX10, DDX5, DDX6, |
| | DEK, DICER1, DNMT3A, DUX4, EBF1, EGFR, EIF4A2, ELF4, ELK4, ELKS, ELL, ELN, |
| | EML4, EP300, EPS15, ERBB2, ERCC2, ERCC3, ERCC4, ERCC5, ERG, ETV1, ETV4, |
| | ETV5, ETV6, EVI1, EWSR1, EXT1, EXT2, EZH2, FACL6, FAM22A, FAM22B, FAM46C, |
| | FANCA, FANCC, FANCD2, FANCE, FANCF, FANCG, FBXO11, FBXW7, FCGR2B, |
| | FEV, FGFR1, FGFR1OP, FGFR2, FGFR3, FH, FHIT, FIP1L1, FLI1, FLJ27352, FLT3, |
| | FNBP1, FOXL2, FOXO1A, FOXO3A, FOXP1, FSTL3, FUBP1, FUS, FVT1, GAS7, |
| | GATA1, GATA2, GATA3, GMPS, GNA11, GNAQ, GNAS, GOLGA5, GOPC, GPC3, |
| | GPHN, GRAF, HCMOGT-1, HEAB, HERPUD1, HEY1, HIP1, HIST1H4I, HLF, HLXB9, |
| | HMGA1, HMGA2, HNRNPA2B1, HOOK3, HOXA11, HOXA13, HOXA9, HOXC11, |
| | HOXC13, HOXD11, HOXD13, HRAS, HRPT2, HSPCA, HSPCB, IDH1, IDH2, IGH@, |
| | IGK@, IGL@, IKZF1, IL2, IL21R, IL6ST, IL7R, IRF4, IRTA1, ITK, JAK1, JAK2, JAK3, |
| | JAZF1, JUN, KDM5A, KDM5C, KDM6A, KDR, KIAA1549, KIT, KLK2, KRAS, KTN1, |
| | LAF4, LASP1, LCK, LCP1, LCX, LHFP, LIFR, LMO1, LMO2, LPP, LYL1, MADH4, |
| | MAF, MAFB, MALT1, MAML2, MAP2K4, MDM2, MDM4, MDS1, MDS2, MECT1, |
| | MED12, MEN1, MET, MITF, MKL1, MLF1, MLH1, MLL, MLL2, MLL3, MLLT1, |
| | MLLT10, MLLT2, MLLT3, MLLT4, MLLT6, MLLT7, MN1, MPL, MSF, MSH2, MSH6, |
| | MSI2, MSN, MTCP1, MUC1, MUTYH, MYB, MYC, MYCL1, MYCN, MYD88, MYH11, |
| | MYH9, MYST4, NACA, NBS1, NCOA1, NCOA2, NCOA4, NDRG1, NF1, NF2, NFE2L2, |
| | NFIB, NFKB2, NIN, NKX2-1, NONO, NOTCH1, NOTCH2, NPM1, NR4A3, NRAS, |
| | NSD1, NTRK1, NTRK3, NUMA1, NUP214, NUP98, OLIG2, OMD, P2RY8, PAFAH1B2, |
| | PALB2, PAX3, PAX5, PAX7, PAX8, PBRM1, PBX1, PCM1, PCSK7, PDE4DIP, PDGFB, |
| | PDGFRA, PDGFRB, PER1, PHOX2B, PICALM, PIK3CA, PIK3R1, PIM1, PLAG1, PML, |
| | PMS1, PMS2, PMX1, PNUTL1, POU2AF1, POU5F1, PPARG, PPP2R1A, PRCC, PRDM1, |
| | PRDM16, PRF1, PRKAR1A, PRO1073, PSIP2, PTCH, PTEN, PTPN11, RAB5EP, |
| | RAD51L1, RAF1, RALGDS, RANBP17, RAP1GDS1, RARA, RB1, RBM15, RECQL4, |
| | REL, RET, ROS1, RPL22, RPN1, RUNDC2A, RUNX1, RUNXBP2, SBDS, SDH5, SDHB, |
| | SDHC, SDHD, SEPT6, SET, SETD2, SF3B1, SFPQ, SFRS3, SH3GL1, SIL, SLC45A3, |
| | SMARCA4, SMARCB1, SMO, SOCS1, SOX2, SRGAP3, SRSF2, SS18, SS18L1, |
| | SSH3BP1, SSX1, SSX2, SSX4, STK11, STL, SUFU, SUZ12, SYK, TAF15, TAL1, TAL2, |
| | TCEA1, TCF1, TCF12, TCF3, TCF7L2, TCL1A, TCL6, TET2, TFE3, TFEB, TFG, TFPT, |
| | TFRC, THRAP3, TIF1, TLX1, TLX3, TMPRSS2, TNFAIP3, TNFRSF14, TNFRSF17, |
| | TNFRSF6, TOP1, TP53, TPM3, TPM4, TPR, TRA@, TRB@, TRD@, TRIM27, TRIM33, |
| | TRIP11, TSC1, TSC2, TSHR, TTL, U2AF1, USP6, VHL, VTI1A, WAS, WHSC1, |
| | WHSC1L1, WIF1, WRN, WT1, WTX, XPA, XPC, XPO1, YWHAE, ZNF145, ZNF198, |
| | ZNF278, ZNF331, ZNF384, ZNF521, ZNF9, ZRSR2 |
| Known Cancer | AR, androgen receptor; ARPC1A, actin-related protein complex 2/3 subunit A; AURKA, |
| Genes | Aurora kinase A; BAG4, BCl-2 associated anthogene 4; BCl2l2, BCl-2 like 2; BIRC2, |
| | Baculovirus IAP repeat containing protein 2; CACNA1E, calcium channel voltage dependent |
| | alpha-1E subunit; CCNE1, cyclin E1; CDK4, cyclin dependent kinase 4; CHD1L, |
| | chromodomain helicase DNA binding domain 1-like; CKS1B, CDC28 protein kinase 1B; |
| | COPS3, COP9 subunit 3; DCUN1D1, DCN1 domain containing protein 1; DYRK2, dual |
| | specificity tyrosine phosphorylation regulated kinase 2; EEF1A2, eukaryotic elongation |
| | transcription factor 1 alpha 2; EGFR, epidermal growth factor receptor; FADD, Fas- |
| | associated via death domain; FGFR1, fibroblast growth factor receptor 1, GATA6, GATA |
| | binding protein 6; GPC5, glypican 5; GRB7, growth factor receptor bound protein 7; |
| | MAP3K5, mitogen activated protein kinase kinase kinase 5; MED29, mediator complex |
| | subunit 5; MITF, microphthalmia associated transcription factor; MTDH, metadherin; |
| | NCOA3, nuclear receptor coactivator 3; NKX2-1, NK2 homeobox 1; PAK1, |
| | p21/CDC42/RAC1-activated kinase 1; PAX9, paired box gene 9; PIK3CA, |
| | phosphatidylinositol-3 kinase catalytic a; PLA2G10, phopholipase A2, group X; PPM1D, |
| | protein phosphatase magnesium-dependent 1D; PTK6, protein tyrosine kinase 6; PRKCI, |
| | protein kinase C iota; RPS6KB1, ribosomal protein s6 kinase 70 kDa; SKP2, s-phase kinase |
| | associated protein; SMURF1, sMAD specific E3 ubiquitin protein ligase 1; SHH, sonic |
| | hedgehog homologue; STARD3, sTAR-related lipid transfer domain containing protein 3; |
| | YWHAQ, tyrosine 3-monooxygenase/tryptophan 5-monooxygenase activation protein, zeta |
| | isoform; ZNF217, zinc finger protein 217 |
| Mitotic Related | Aurora kinase A (AURKA); Aurora kinase B (AURKB); Baculoviral IAP repeat-containing |
| Cancer Genes | 5, survivin (BIRC5); Budding uninhibited by benzimidazoles 1 homolog (BUB1); Budding |
| | uninhibited by benzimidazoles 1 homolog beta, BUBR1 (BUB1B); Budding uninhibited by |
| | benzimidazoles 3 homolog (BUB3); CDC28 protein kinase regulatory subunit 1B (CKS1B); |
| | CDC28 protein kinase regulatory subunit 2 (CKS2); Cell division cycle 2 (CDC2)/CDK1 |
| | Cell division cycle 20 homolog (CDC20); Cell division cycle-associated 8, borealin |
| | (CDCA8); Centromere protein F, mitosin (CENPF); Centrosomal protein 110 kDa (CEP110); |
| | Checkpoint with forkhead and ring finger domains (CHFR); Cyclin B1 (CCNB1); Cyclin B2 |
| | (CCNB2); Cytoskeleton-associated protein 5 (CKAP5/ch-TOG); Microtubule-associated |
| | protein RP/EB family member 1. End-binding protein 1, EB1 (MAPRE1); Epithelial cell |
| | transforming sequence 2 oncogene (ECT2); Extra spindle poles like 1, separase (ESPL1); |
| | Forkhead box M1 (FOXM1); H2A histone family, member X (H2AFX); Kinesin family |
| | member 4A (KIF4A); Kinetochore-associated 1 (KNTC1/ROD); Kinetochore-associated 2; |
| | highly expressed in cancer 1 (KNTC2/HEC1); Large tumor suppressor, homolog 1 (LATS1); |
| | Large tumor suppressor, homolog 2 (LATS2); Mitotic arrest deficient-like 1; MAD1 |
| | (MAD1L1); Mitotic arrest deficient-like 2; MAD2 (MAD2L1); Mps1 protein kinase (TTK); |
| | Never in mitosis gene a-related kinase 2 (NEK2); Ninein, GSKSb interacting protein (NIN); |
| | Non-SMC condensin I complex, subunit D2 (NCAPD2/CNAP1); Non-SMC condensin I |
| | complex, subunit H (NACPH/CAPH); Nuclear mitotic apparatus protein 1 (NUMA1); |
| | Nucleophosmin (nucleolar phosphoprotein B23, numatrin); (NPM1); Nucleoporin (NUP98); |
| | Pericentriolar material 1 (PCM1); Pituitary tumor-transforming 1, securin (PTTG1); Polo-like |
| | kinase 1 (PLK1); Polo-like kinase 4 (PLK4/SAK); Protein (peptidylprolyl cis/trans |
| | isomerase) NIMA-interacting 1 (PIN1); Protein regulator of cytokinesis 1 (PRC1); RAD21 |
| | homolog (RAD21); Ras association (RalGDS/AF-6); domain family 1 (RASSF1); Stromal |
| | antigen 1 (STAG1); Synuclein-c, breast cancer-specific protein 1 (SNCG, BCSG1); |
| | Targeting protein for Xklp2 (TPX2); Transforming, acidic coiled-coil containing protein 3 |
| | (TACC3); Ubiquitin-conjugating enzyme E2C (UBE2C); Ubiquitin-conjugating enzyme E2I |
| | (UBE2I/UBC9); ZW10 interactor, (ZWINT); ZW10, kinetochore-associated homolog |
| | (ZW10); Zwilch, kinetochore-associated homolog (ZWILCH) |
| Ribonucleoprotein | Argonaute family member, Ago1, Ago2, Ago3, Ago4, GW182 (TNRC6A), TNRC6B, |
| complexes | TNRC6C, HNRNPA2B1, HNRPAB, ILF2, NCL (Nucleolin), NPM1 (Nucleophosmin), |
| | RPL10A, RPL5, RPLP1, RPS12, RPS19, SNRPG, TROVE2, apolipoprotein, apolipoprotein |
| | A, apo A-I, apo A-II, apo A-IV, apo A-V, apolipoprotein B, apo B48, apo B100, |
| | apolipoprotein C, apo C-I, apo C-II, apo C-III, apo C-IV, apolipoprotein D (ApoD), |
| | apolipoprotein E (ApoE), apolipoprotein H (ApoH), apolipoprotein L, APOL1, APOL2, |
| | APOL3, APOL4, APOL5, APOL6, APOLD1 |
| Cytokine Receptors | 4-1BB, ALCAM, B7-1, BCMA, CD14, CD30, CD40 Ligand, CEACAM-1, DR6, Dtk, |
| | Endoglin, ErbB3, E-Selectin, Fas, Flt-3L, GITR, HVEM, ICAM-3, IL-1 R4, IL-1 RI, IL-10 |
| | Rbeta, IL-17R, IL-2Rgamma, IL-21R, LIMPII, Lipocalin-2, L-Selectin, LYVE-1, MICA, |
| | MICB, NRG1-betal, PDGF Rbeta, PECAM-1, RAGE, TIM-1, TRAIL R3, Trappin-2, uPAR, |
| | VCAM-1, XEDAR |
| Prostate and | ErbB3, RAGE, Trail R3 |
| colorectal cancer | |
| vesicles | |
| Colorectal cancer | IL-1 alpha, CA125, Filamin, Amyloid A |
| vesicles | |
| Colorectal cancer v | Involucrin, CD57, Prohibitin, Thrombospondin, Laminin B1/b1, Filamin, 14.3.3 gamma, |
| adenoma vesicles | 14.3.3 Pan |
| Colorectal | Involucrin, Prohibitin, Laminin B1/b1, IL-3, Filamin, 14.3.3 gamma, 14.3.3 Pan, MMP-15/ |
| adenoma vesicles | MT2-MMP, hPL, Ubiquitin, and mRANKL |
| Brain cancer | Prohibitin, CD57, Filamin, CD18, b-2-Microglobulin, IL-2, IL-3, CD16, p170, Keratin 19, |
| vesicles | Pds1, Glicentin, SRF (Serum Response Factor), E3-binding protein (ARM1), Collagen II, |
| | SRC1 (Steroid Receptor Coactivator-1) Ab-1, Caldesmon, GFAP, TRP75/gp75, alpha-1- |
| | antichymotrypsin, Hepatic Nuclear Factor-3B, FLAP, Tyrosinase, NF kappa B/p50, |
| | Melanoma (gp100), Cyclin E, 6-Histidine, Mucin 3 (MUC3), TdT, CD21, XPA, Superoxide |
| | Dismutase, Glycogen Synthase Kinase 3b (GSK3b), CD54/ICAM-1, Thrombospondin, Gai1, |
| | CD79a mb-1, IL-1 beta, Cytochrome c, RAD1, bcl-X, CD50/ICAM-3, Neurofilament, |
| | Alkaline Phosphatase (AP), ER Ca + 2 ATPase2, PCNA, F.VIII/VWF, SV40 Large T Antigen, |
| | Paxillin, Fascin, CD165, GRIP1, Cdk8, Nucleophosmin (NPM), alpha-1-antitrypsin, |
| | CD32/Fcg Receptor II, Keratin 8 (phospho-specific Ser73), DR5, CD46, TID-1, MHC II |
| | (HLA-DQ), Plasma Cell Marker, DR3, Calmodulin, AIF (Apoptosis Inducing Factor), DNA |
| | Polymerase Beta, Vitamin D Receptor (VDR), Bcl10/CIPER/CLAP/mE10, Neuron |
| | Specific Enolase, CXCR4/Fusin, Neurofilament (68 kDa), PDGFR, beta, Growth Hormone |
| | (hGH), Mast Cell Chymase, Ret Oncoprotein, and Phosphotyrosine |
| Melanoma vesicles | Caspase 5, Thrombospondin, Filamin, Ferritin, 14.3.3 gamma, 14.3.3 Pan, CD71/Transferrin |
| | Receptor, and Prostate Apoptosis Response Protein-4 |
| Head and neck | 14.3.3 Pan, Filamin, 14.3.3 gamma, CD71/Transferrin Receptor, CD30, Cdk5, CD138, |
| cancer vesicles | Thymidine Phosphorylase, Ruv 5, Thrombospondin, CD1, Von Hippel-Lindau Protein, |
| | CD46, Rad51, Ferritin, c-Abl, Actin, Muscle Specific, LewisB |
| Membrane proteins | carbonic anhydrase IX, B7, CCCL19, CCCL21, CSAp, HER-2/neu, BrE3, CD1, CD1a, CD2, |
| | CD3, CD4, CD5, CD8, CD11A, CD14, CD15, CD16, CD18, CD19, CD20, CD21, CD22, |
| | CD23, CD25, CD29, CD30, CD32b, CD33, CD37, CD38, CD40, CD40L, CD44, CD45, |
| | CD46, CD52, CD54, CD55, CD59, CD64, CD67, CD70, CD74, CD79a, CD80, CD83, |
| | CD95, CD126, CD133, CD138, CD147, CD154, CEACAM5, CEACAM-6, alpha-fetoprotein |
| | (AFP), VEGF, ED-B fibronectin, EGP-1, EGP-2, EOF receptor (ErbB1), ErbB2, ErbB3, |
| | Factor H, FHL-1, Flt-3, folate receptor, Ga 733,GROB, HMGB-1, hypoxia inducible factor |
| | (HIF), HM1.24, HER-2/neu, insulin-like growth factor (ILGF), IFN-γ, IFN-α, IL-β, IL-2R, |
| | IL-4R, IL-6R, IL-13R, IL-15R, IL-17R, IL-18R, IL-2, IL-6, IL-8, IL-12, IL-15, IL-17, IL-18, |
| | IL-25, IP-10, IGF-1R, Ia, HM1.24, gangliosides, HCG, HLA-DR, CD66a-d, MAGE, mCRP, |
| | MCP-1, MIP-1A, MIP-1B, macrophage migration-inhibitory factor (MIF), MUC1, MUC2, |
| | MUC3, MUC4, MUC5, placental growth factor (P1GF), PSA (prostate-specific antigen), |
| | PSMA, PSMA dimer, PAM4 antigen, NCA-95, NCA-90, A3, A33, Ep-CAM, KS-1, Le(y), |
| | mesothelin, S100, tenascin, TAC, Tn antigen, Thomas-Friedenreich antigens, tumor necrosis |
| | antigens, tumor angiogenesis antigens, TNF-α, TRAIL receptor (R1 and R2), VEGFR, |
| | RANTES, T101, cancer stem cell antigens, complement factors C3, C3a, C3b, C5a, C5 |
| Cluster of | CD1, CD2, CD3, CD4, CD5, CD6, CD7, CD8, CD9, CD10, CD11a, CD11b, CD11c, |
| Differentiation | CD12w, CD13, CD14, CD15, CD16, CDwl7, CD18, CD19, CD20, CD21, CD22, CD23, |
| (CD) proteins | CD24, CD25, CD26, CD27, CD28, CD29, CD30, CD31, CD32, CD33, CD34, CD35, CD36, |
| | CD37, CD38, CD39, CD40, CD41, CD42, CD43, CD44, CD45, CD46, CD47, CD48, |
| | CD49a, CD49b, CD49c, CD49d, CD49e, CD49f, CD53, CD54, CD55, CD56, CD57, CD58, |
| | CD59, CD61, CD62E, CD62L, CD62P, CD63, CD68, CD69, CD71, CD72, CD73, CD74, |
| | CD80, CD81, CD82, CD83, CD86, CD87, CD88, CD89, CD90, CD91, CD95, CD96, |
| | CD100, CD103, CD105, CD106, CD107, CD107a, CD107b, CD109, CD117, CD120, |
| | CD127, CD133, CD134, CD135, CD138, CD141, CD142, CD143, CD144, CD147, CD151, |
| | CD152, CD154, CD156, CD158, CD163, CD165, CD166, CD168, CD184, CDw186, |
| | CD195, CD197, CD209, CD202a, CD220, CD221, CD235a, CD271, CD303, CD304, |
| | CD309, CD326 |
| Interleukin (IL) | IL-1, IL-2, IL-3, IL-4, IL-5, IL-6, IL-7, IL-8 or CXCL8, IL-9, IL-10, IL-11, IL-12, IL-13, IL- |
| proteins | 14, IL-15, IL-16, IL-17, IL-18, IL-19, IL-20, IL-21, IL-22, IL-23, IL-24, IL-25, IL-26, IL-27, |
| | IL-28, IL-29, IL-30, IL-31, IL-32, IL-33, IL-35, IL-36 |
| IL receptors | CD121a/IL1R1, CD121b/IL1R2, CD25/IL2RA, CD122/IL2RB, CD132/IL2RG, |
| | CD123/IL3RA, CD131/IL3RB, CD124/IL4R, CD132/IL2RG, CD125/IL5RA, |
| | CD131/IL3RB, CD126/IL6RA, CD130/IR6RB, CD127/IL7RA, CD132/IL2RG, |
| | CXCR1/IL8RA, CXCR2/IL8RB/CD128, CD129/IL9R, CD210/IL10RA, |
| | CDW210B/IL10RB, IL11RA, CD212/IL12RB1, IR12RB2, IL13R, IL15RA, CD4, |
| | CDw217/IL17RA, IL17RB, CDw218a/IL18R1, IL20R, IL20R, IL21R, IL22R, IL23R, |
| | IL20R, LY6E, IL20R1, IL27RA, IL28R, IL31RA |
| Mucin (MUC) | MUC1, MUC2, MUC3A, MUC3B, MUC4, MUC5AC, MUC5B, MUC6, MUC7, MUC8, |
| proteins | MUC12, MUC13, MUC15, MUC16, MUC17, MUC19, and MUC20 |
| MUC1 isoforms | mucin-1 isoform 2 precursor or mature form (NP_001018016.1), mucin-1 isoform 3 |
| | precursor or mature form (NP_001018017.1), mucin-1 isoform 5 precursor or mature form |
| | (NP_001037855.1), mucin-1 isoform 6 precursor or mature form (NP_001037856.1), mucin- |
| | 1 isoform 7 precursor or mature form (NP_001037857.1), mucin-1 isoform 8 precursor or |
| | mature form (NP_001037858.1), mucin-1 isoform 9 precursor or mature form |
| | (NP_001191214.1), mucin-1 isoform 10 precursor or mature form (NP_001191215.1), |
| | mucin-1 isoform 11 precursor or mature form (NP_001191216.1), mucin-1 isoform 12 |
| | precursor or mature form (NP_001191217.1), mucin-1 isoform 13 precursor or mature form |
| | (NP_001191218.1), mucin-1 isoform 14 precursor or mature form (NP_001191219.1), |
| | mucin-1 isoform 15 precursor or mature form (NP_001191220.1), mucin-1 isoform 16 |
| | precursor or mature form (NP_001191221.1), mucin-1 isoform 17 precursor or mature form |
| | (NP_001191222.1), mucin-1 isoform 18 precursor or mature form (NP_001191223.1), |
| | mucin-1 isoform 19 precursor or mature form (NP_001191224.1), mucin-1 isoform 20 |
| | precursor or mature form (NP_001191225.1), mucin-1 isoform 21 precursor or mature form |
| | (NP_001191226.1), mucin-1 isoform 1 precursor or mature form (NP_002447.4), |
| | ENSP00000357380, ENSP00000357377, ENSP00000389098, ENSP00000357374, |
| | ENSP00000357381, ENSP00000339690, ENSP00000342814, ENSP00000357383, |
| | ENSP00000357375, ENSP00000338983, ENSP00000343482, ENSP00000406633, |
| | ENSP00000388172, ENSP00000357378, P15941-1, P15941-2, P15941-3, P15941-4, |
| | P15941-5, P15941-6, P15941-7, P15941-8, P15941-9, P15941-10, secreted isoform, |
| | membrane bound isoform, CA 27.29 (BR 27.29), CA 15-3, PAM4 reactive antigen, |
| | underglycosylated isoform, unglycosylated isoform, CanAg antigen |
| MUC1 interacting | ABL1, SRC, CTNND1, ERBB2, GSK3B, JUP, PRKCD, APC, GALNT1, GALNT10, |
| proteins | GALNT12, JUN, LCK, OSGEP, ZAP70, CTNNB1, EGFR, SOS1, ERBB3, ERBB4, GRB2, |
| | ESR1, GALNT2, GALNT4, LYN, TP53, C1GALT1, C1GALT1C1, GALNT3, GALNT6, |
| | GCNT1, GCNT4, MUC12, MUC13, MUC15, MUC17, MUC19, MUC2, MUC20, MUC3A, |
| | MUC4, MUC5B, MUC6, MUC7, MUCL1, ST3GAL1, ST3GAL3, ST3GAL4, |
| | ST6GALNAC2, B3GNT2, B3GNT3, B3GNT4, B3GNT5, B3GNT7, B4GALT5, GALNT11, |
| | GALNT13, GALNT14, GALNT5, GALNT8, GALNT9, ST3GAL2, ST6GAL1, |
| | ST6GALNAC4, GALNT15, MYOD1, SIGLEC1, IKBKB, TNFRSF1A, IKBKG, MUC1 |
| Tumor markers | Alphafetoprotein (AFP), Carcinoembryonic antigen (CEA), CA-125, MUC-1, Epithelial |
| | tumor antigen (ETA), Tyrosinase, Melanoma-associated antigen (MAGE), p53 |
| Tumor markers | Alpha fetoprotein (AFP), CA15-3, CA27-29, CA19-9, CA-125, Calretinin, |
| | Carcinoembryonic antigen, CD34, CD99, CD117, Chromogranin, Cytokeratin (various |
| | types), Desmin, Epithelial membrane protein (EMA), Factor VIII, CD31 FL1, Glia1 fibrillary |
| | acidic protein (GFAP), Gross cystic disease fluid protein (GCDFP-15), HMB-45, Human |
| | chorionic gonadotropin (hCG), immunoglobulin, inhibin, keratin (various types), PTPRC |
| | (CD45), lymphocyte marker (various types, MART-1 (Melan-A), Myo D1, muscle-specific |
| | actin (MSA), neurofilament, neuron-specific enolase (NSE), placental alkaline phosphatase |
| | (PLAP), prostate-specific antigen, S100 protein, smooth muscle actin (SMA), synaptophysin, |
| | thyroglobulin, thyroid transcription factor-1, Tumor M2-PK, vimentin |
| Cell adhesion | Immunoglobulin superfamily CAMs (IgSF CAMs), N-CAM (Myelin protein zero), ICAM (1, |
| molecule (CAMs) | 5), VCAM-1, PE-CAM, L1-CAM, Nectin (PVRL1, PVRL2, PVRL3), Integrins, LFA-1 |
| | (CD11a + CD18), Integrin alphaXbeta2 (CD11c + CD18), Macrophage-1 antigen |
| | (CD11b + CD18), VLA-4 (CD49d + CD29), Glycoprotein IIb/IIIa (ITGA2B + ITGB3), |
| | Cadherins, CDH1, CDH2, CDH3, Desmosomal, Desmoglein (DSG1, DSG2, DSG3, DSG4), |
| | Desmocollin (DSC1, DSC2, DSC3), Protocadherin, PCDH1, T-cadherin, CDH4, CDH5, |
| | CDH6, CDH8, CDH11, CDH12, CDH15, CDH16, CDH17, CDH9, CDH10, Selectins, E- |
| | selectin, L-selectin, P-selectin, Lymphocyte homing receptor: CD44, L-selectin, integrin |
| | (VLA-4, LFA-1), Carcinoembryonic antigen (CEA), CD22, CD24, CD44, CD146, CD164 |
| Annexins | ANXA1; ANXA10; ANXA11; ANXA13; ANXA2; ANXA3; ANXA4; ANXA5; ANXA6; |
| | ANXA7; ANXA8; ANXA8L1; ANXA8L2; ANXA9 |
| Cadherins | CDH1, CDH2, CDH12, CDH3, Deomoglein, DSG1, DSG2, DSG3, DSG4, Desmocollin, |
| (“calcium- | DSC1, DSC2, DSC3, Protocadherins, PCDH1, PCDH10, PCDH11x, PCDH11y, PCDH12, |
| dependent | FAT, FAT2, FAT4, PCDH15, PCDH17, PCDH18, PCDH19; PCDH20; PCDH7, PCDH8, |
| adhesion”) | PCDH9, PCDHA1, PCDHA10, PCDHA11, PCDHA12, PCDHA13, PCDHA2, PCDHA3, |
| | PCDHA4, PCDHA5, PCDHA6, PCDHA7, PCDHA8, PCDHA9, PCDHAC1, PCDHAC2, |
| | PCDHB1, PCDHB10, PCDHB11, PCDHB12, PCDHB13, PCDHB14, PCDHB15, |
| | PCDHB16, PCDHB17, PCDHB18, PCDHB2, PCDHB3, PCDHB4, PCDHB5, PCDHB6, |
| | PCDHB7, PCDHB8, PCDHB9, PCDHGA1, PCDHGA10, PCDHGA11, PCDHGA12, |
| | PCDHGA2; PCDHGA3, PCDHGA4, PCDHGA5, PCDHGA6, PCDHGA7, PCDHGA8, |
| | PCDHGA9, PCDHGB1, PCDHGB2, PCDHGB3, PCDHGB4, PCDHGB5, PCDHGB6, |
| | PCDHGB7, PCDHGC3, PCDHGC4, PCDHGC5, CDH9 (cadherin 9, type 2 (T1-cadherin)), |
| | CDH10 (cadherin 10, type 2 (T2-cadherin)), CDH5 (VE-cadherin (vascular endothelial)), |
| | CDH6 (K-cadherin (kidney)), CDH7 (cadherin 7, type 2), CDH8 (cadherin 8, type 2), |
| | CDH11 (OB-cadherin (osteoblast)), CDH13 (T-cadherin - H-cadherin (heart)), CDH15 (M- |
| | cadherin (myotubule)), CDH16 (KSP-cadherin), CDH17 (LI cadherin (liver-intestine)), |
| | CDH18 (cadherin 18, type 2), CDH19 (cadherin 19, type 2), CDH20 (cadherin 20, type 2), |
| | CDH23 (cadherin 23, (neurosensory epithelium)), CDH10, CDH11, CDH13, CDH15, |
| | CDH16, CDH17, CDH18, CDH19, CDH20, CDH22, CDH23, CDH24, CDH26, CDH28, |
| | CDH4, CDH5, CDH6, CDH7, CDH8, CDH9, CELSR1, CELSR2, CELSR3, CLSTN1, |
| | CLSTN2, CLSTN3, DCHS1, DCHS2, LOC389118, PCLKC, RESDA1, RET |
| ECAD (CDH1) | SNAI1/SNAIL, ZFHX1B/SIP1, SNAI2/SLUG, TWIST1, DeltaEF1 |
| downregulators | |
| ECAD | AML1, p300, HNF3 |
| upregulators | |
| ECAD interacting | ACADVL, ACTG1, ACTN1, ACTN4, ACTR3, ADAM10, ADAM9, AJAP1, ANAPC1, |
| proteins | ANAPC11, ANAPC4, ANAPC7, ANK2, ANP32B, APC2, ARHGAP32, ARPC2, ARVCF, |
| | BOC, C1QBP, CA9, CASP3, CASP8, CAV1, CBLL1, CCNB1, CCND1, CCT6A, CDC16, |
| | CDC23, CDC26, CDC27, CDC42, CDH2, CDH3, CDK5R1, CDON, CDR2, CFTR, |
| | CREBBP, CSE1L, CSNK2A1, CTNNA1, CTNNB1, CTNND1, CTNND2, DNAJA1, DRG1, |
| | EGFR, EP300, ERBB2, ERBB2IP, ERG, EZR, PER, FGFR1, FOXM1, FRMD5, FYN, |
| | GBAS, GNA12, GNA13, GNB2L1, GSK3B, HDAC1, HDAC2, HSP90AA1, HSPA1A, |
| | HSPA1B, HSPD1, IGHA1, IQGAP1, IRS1, ITGAE, ITGB7, JUP, KIFC3, KLRG1, KRT1, |
| | KRT9, LIMA1, LMNA, MAD2L2, MAGI1, MAK, MDM2, MET, MYO6, MYO7A, |
| | NDRG1, NEDD9, NIPSNAP1, NKD2, PHLPP1, PIP5K1C, PKD1, PKP4, PLEKHA7, |
| | POLR2E, PPP1CA, PRKD1, PSEN1, PTPN1, PTPN14, PTPRF, PTPRM, PTPRQ, PTTG1, |
| | PVR, PVRL1, RAB8B, RRM2, SCRIB, SET, SIX1, SKI, SKP2, SRC, TACC3, TAS2R13, |
| | TGM2, TJP1, TK1, TNS3, TTK, UBC, USP9X, VCL, VEZT, XRCC5, YAP1, YES1, |
| | ZC3HC1 |
| Epithelial- | SERPINA3, ACTN1, AGR2, AKAP12, ALCAM, AP1M2, AXL, BSPRY, CCL2, CDH1, |
| mesenchymal | CDH2, CEP170, CLDN3, CLDN4, CNN3, CYP4X1, DNMT3A, DSG3, DSP, EFNB2, EHF, |
| transition (EMT) | ELF3, ELF5, ERBB3, ETV5, FLRT3, FOSB, FOSL1, FOXC1, FX YD 5, GPDIL, HMGA1, |
| | HMGA2, HOPX, IFI16, IGFBP2, IHH, IKBIP, IL-11, IL-18, IL6, IL8, ITGA5, ITGB3, |
| | LAMB1, LCN2, MAP7, MB, MMP7, MMP9, MPZL2, MSLN, MTA3, MTSS1, OCLN, |
| | PCOLCE2, PECAM1, PLAUR, PLXNB1, PPL, PPP1R9A, RASSF8, SCNN1A, SERPINB2, |
| | SERPINE1, SFRP1, SH3YL1, SLC27A2, SMAD7, SNAI1, SNAI2, SPARC, SPDEF, SRPX, |
| | STAT5A, TBX2, TJP3, TMEM125, TMEM45B, TWIST1, VCAN, VIM, VWF, XBP1, |
| | YBX1, ZBTB10, ZEB1, ZEB2 |
| Vesicle Associated | ALB, C3, A2M, TF, APOB, KRT1, KRT10, FGA, IGHG1, SERPINA1, FOB, KRT2, HP, |
| | IGHG3, IGHA1, SERPINA3, C4A, IGKC, C4B, CP, IGHM, FGG, KRT9, IGHG2, FN1, |
| | CFH, SERPINC1, C4A, APOA1, GC, Ig mu heavy chain disease protein, IGHG4, HPX, |
| | IGHA2, IGLC2, ITIH1, KNG1, ITIH4, ITIH2, AGT, PLG, APOA4, KRT14, CFB, IGLC1, |
| | ITIH4, ORM1, ITIH4, AHSG, A1BG, IGLL5, SERPING1, Ig kappa chain V-I region DEE, |
| | APOE, Ig kappa chain V-I region OU, ORM2, AFM, Ig heavy chain V-III region BUT, |
| | C4BPA, KRT6A, SERPINF1, APCS, APOH, CLU, KRT5, Ig heavy chain V-III region BRO, |
| | Ig heavy chain V-III region GAL, HRG, Ig heavy chain V-III region CAM, VTN, |
| | SERPIND1, TTR, PON1, Ig heavy chain V-III region TIL, C1QC, SERPINA7, Ig kappa |
| | chain V-I region CAR, Ig kappa chain V-IV region Len, AMBP, KRT13, Ig kappa chain V- |
| | III region SIE, SERPINF2, Ig heavy chain V-III region VH26, C5, F2, IGKV4-1, C7, Ig |
| | kappa chain V-I region EU, Ig kappa chain V-III region NG9 (Fragment), GSN, LPA, LYZ, |
| | Ig kappa chain V-III region HAH, Ig lambda chain V-III region LOI, SERPINA6, AZGP1, |
| | C1S, CFHR1, C9, HRNR, APOL1, C1QB, Ig kappa chain V-I region Ni, Ig heavy chain V- |
| | III region WEA, Ig kappa chain V-II region TEW, SERPINA4, DCD, LRG1, GSN, RBP4, |
| | SMC3, PRSS3, IGJ, C6, SEPP1, HBA1, Ig kappa chain V-III region CLL, ABCF1, APOD, |
| | SERPINA5, PDE4D, C2, C8A, C1R, CD5L, CFHR2, FLG2, HBB, CFI, Ig kappa chain V-II |
| | region MIL, Ig heavy chain V-II region NEWM, C8G, Ig lambda chain V-III region SH, |
| | PGLYRP2, SBSN, Ig lambda chain V-I region WAH, Ig lambda chain V-IV region Hil, |
| | SAA4, F10, MASP1, SHROOM3, F13A1, Ig lambda chain V region 4A, GIT2, KLKB1, |
| | ATRN, Ig heavy chain V-I region HG3, ITIH3, CDK10, APOA2, Ig heavy chain V-II region |
| | OU, Ig heavy chain V-I region V35, UTF1, MAP1B, PAPLN, Ig kappa chain V-I region Lay, |
| | RNF207, VPS13D, CRYGN, HMCN1, SLC27A6, FN1, VWF, C8B, LGALS3BP, HP, |
| | PROS1, ECM1, HPR, LBP, HABP2, FCN2, KRT77, APOM, Ig kappa chain V-I region |
| | WEA, GC, PLA2G7, Ig kappa chain V-I region Scw, CFP, APOM, MASP1, IGKV1-5, F12, |
| | SERPINA1, F13B, FCN2, PCYOX1, C4BPB, LCAT, KRT73, Ig heavy chain V-III region |
| | GA, Ig kappa chain V-III region VG (Fragment), MBL2, EEF2, MAP3K6, EPHA5, APOC4, |
| | CAMP, SERPINA10, FCGBP, PCSK9, CPB2, CFHR5, SAFB2, C2CD4C, F5, NUP153, |
| | XYLT1, EP300, BMP8A, N4BP2, KRT4, KRT16, Ig kappa chain V-III region B6, KRT86, |
| | KRT85, ANXA1, KRT78, SPRR2E, CLU, CRNN, ARHGEF17, SPRR3, FN1, ARHGAP30, |
| | ACTG2, SFTPA1, CDC5L, FN1, IGLC7, FLG, SERPINA1, Ig heavy chain V-III region |
| | TUR, JUP, DSP, KNG1, KPRP, LCE1C, Ig heavy chain V-II region ARH-77, Ig kappa chain |
| | V-III region POM, FBLN1, C1QA, FCN3, Ig lambda chain V-IV region Bau, Ig lambda |
| | chain V-VI region WLT, UPF3A, SERPINF2, XIRP2, CFB, SERPINA3, DSG1, TTN, |
| | LRRCC1, MYO15A, ANKRD28, Ig heavy chain V-III region HIL, KIT, DNMT1, PLXND1, |
| | Ig kappa chain V-I region Mev, IGHD, RCBTB1, BCO1, KRT6B, KRT13, Ig kappa chain V- |
| | II region RPMI 6410, Ig kappa chain V-IV region B17, ACTB, FN1, SARDH, GK, EMC4, |
| | MED30, PIGR, HSPB1, DSP, VEPH1, SNX27, LRRC53, SIGLEC16, F9, Ig heavy chain V- |
| | III region TRO, APOC3, TOP2A, FLYWCH1, ACTL10 |
| Vesicle Associated | KRT6A, DSP, KRT6B, ACTB, FLG, IVL, SFN, KRT77, LMNA, KRT15, LGALS7, |
| | HSPA8, EPPK1, HSPA1A, DSG1, GSN, HIST1H2BK, EEF1A1, RPLP2, KRT74, YWHAB, |
| | PKP1, JUP, HNRNPA1, HSP90AA1, HIST1H2AH, GAPDH, HIST1H1E, HSPB1, |
| | CALML5, DCD, YWHAQ, VCP, AHNAK, SFPQ, PLEC, SERBP1, P4HB, PPL, Ig lambda |
| | chain V-IV region Hil, EIF3B, HSPA5, C3, TUBB4A, IGHG1, RPS3A, PPIA, SPTBN2, |
| | PDIA3, KRT80, DBNL, RPL29, RPL3, ANXA2P2, TPI1, RDX, H1F0, PGAM2, IGLC2, |
| | EVPL, ENO1, HNRNPA2B1, RPL7A, MYL6, ANXA1, TRIM29, RPS19, POF1B, RPL6, |
| | MORC2, RTN4, CA/CK E, LYZ, ZDBF2, IGKC, Ig heavy chain V-III region TIL, C4BPA, |
| | ACTB, LCE1C, IGHG3, SHOX2, KRT17, KRT77, KRT80, PIGR, KNG1, DSG1, DSP, |
| | SHROOM3, FGA, KPRP, DUSP27, LCE1C, SARDH, LYZ, SHISA5, HSP90AB1, EEF1A1, |
| | FGB, SHROOM3, IGLC2, KRT85, BMP8A, LCE2B, KRT6A, IGKC, S100A9, EEF1A1, |
| | C3, DCD, S100A8, LCE1C, ALB, IGLC2, S100A9, HSP90AB1, ACTB, KRT5, Ig kappa |
| | chain V-II region MIL, HRNR, IGHG1, HIST1H4A, DEFA1, LYZ, C3, SHROOM3, Ig |
| | kappa chain V-IV region STH (Fragment), Ig lambda chain V-I region HA, IGHA2, SARDH, |
| | H3F3C, LTF, TF |
| Vesicle Associated | C3, A2M, APOB, IGKC, C4A, C4B, FGB, ALB, CFH, IGHG1, FGA, FN1, PLG, IGHM, |
| | FGG, TF, C5, CP, IGHG2, IGLC2, Ig mu heavy chain disease protein, ITIH1, PZP, IGHG3, |
| | IGLL5, HP, C4BPA, ITIH2, IGHA1, KRT1, KRT10, APOE, Ig kappa chain V-I region DEE, |
| | AMBP, F2, C7, C6, ITIH4, CFB, IGHG4, APOH, APOA1, CD5L, C1R, HPR, Ig kappa |
| | chain V-I region Scw, IGHA2, CFHR1, KRT2, Ig kappa chain V-III region SIE, HRG, Ig |
| | heavy chain V-III region BRO, C1QB, GC, Ig heavy chain V-III region TIL, Ig kappa chain |
| | V-III region NG9 (Fragment), Ig heavy chain V-III region BUT, Ig heavy chain V-III region |
| | TUR, C9, SERPIND1, Ig kappa chain V-I region WEA, Ig kappa chain V-I region Ni, Ig |
| | kappa chain V-IV region Len, Ig kappa chain V-I region EU, Ig kappa chain V-II region |
| | TEW, Ig heavy chain V-III region GAL, KNG1, VTN, C8B, Ig lambda chain V-III region |
| | LOI, Ig heavy chain V-II region NEWM, APCS, KLKB1, CFI, PROS1, LPA, KRT9, |
| | SERPINA1, Ig lambda chain V-III region SH, C8A, Ig kappa chain V-III region B6, Ig |
| | lambda chain V-IV region Hil, Ig kappa chain V-III region CLL, C1S, FCN3, SERPINC1, Ig |
| | kappa chain V-I region Mev, IGHD, C1QC, HPX, C8G, IGKV1-5, Ig kappa chain V-I region |
| | Wes, Ig heavy chain V-III region WEA, A1BG, GSN, FBLN1, HBB, ITIH3, F12, |
| | SERPINA3, APOC3, Ig kappa chain V-I region BAN, Ig kappa chain V-III region VH |
| | (Fragment), F13B, IGKV4-1, SERPINF2, CLU, HIST1H1D, PON1, IGJ, Ig kappa chain V- |
| | III region POM, Ig heavy chain V-III region CAM, Ig heavy chain V-III region BUR, Ig |
| | kappa chain V-III region VG (Fragment), APOD, Ig lambda chain V-IV region MOL, Ig |
| | heavy chain V-III region GAR, FCGBP, APOM, F13A1, Ig heavy chain V-I region HG3, |
| | C1QA, Ig lambda chain V-VI region WLT, C2, C4BPB, CFP, SERPINA4, SAA4, |
| | SERPINF1, LGALS3BP, HABP2, RCBTB1, APOL1, KCNQ2, F9, Ig heavy chain V-III |
| | region TRO, Ig heavy chain V-III region HIL, Ig heavy chain V-II region OU, APOA2, F11, |
| | Ig lambda chain V-I region WAH, Ig lambda chain V region 4A, Ig kappa chain V-II region |
| | RPMI 6410, Ig kappa chain V-III region IARC/BL41, KRT5, IGLL1, Ig heavy chain V-I |
| | region V35, HBA1, ADIPOQ, PGLYRP2, UPF3A, BCO1, ARFGAP3, SARDH, SERPINA1, |
| | KNG1, Ig kappa chain V-I region Kue, Ig kappa chain V-I region Lay, Ig kappa chain V-I |
| | region OU, Ig kappa chain V-II region MIL, Ig heavy chain V-III region VH26, Ig heavy |
| | chain V-III region GA, FN1, TTR, SERPING1, APOA4, PRSS1, ANXA6, CFTR, LBP, |
| | FBLN1, SPAG17, PDLIM2, ARHGEF17, IGLC7, AGRN, AGT, RBP4, AHSG, Ig kappa |
| | chain V-III region GOL, SERPINA5, GSN, Ig kappa chain V-III region HAH, CFHR2, |
| | GIT2, INCENP |
| Vesicle Associated | MUC5B, FABP5, HPX, CP, SPRR2E, SPRR2D, PDE4D, GC, CPD, CD14, LAP3, |
| | AFM, FCN2, DMBT1, LIFR, SNX27, LCN1, ARFIP1, APOH, KLKB1, XP32, |
| | H2AFV, KRT75, KRT6C, KRT83, KRT76, KRT33B, KRT72, KRT31, KRT73, |
| | DSG1, LCE1C, LCE1A, CFB, CFH, SERPINA1, Ig kappa chain V-I region EU, Ig |
| | kappa chain V-II region MIL, Ig lambda chain V-IV region Bau, Ig heavy chain V- |
| | III region GAL, IGLC6, ACTG2 |

[0326] Examples of additional biomarkers that can be incorporated into the methods and compositions of the invention include without limitation those disclosed in International Patent Application Nos. PCT/US2012/042519 (WO 2012/174282), filed Jun. 14, 2012 and PCT/US2012/050030 (WO 2013/022995), filed Aug. 8, 2012.

[0327] In various embodiments of the invention, the biomarkers or biosignature used to detect or assess any of the conditions or diseases disclosed herein can comprise one or more biomarkers in one of several different categories of markers, wherein the categories include without limitation one or more of: 1) disease specific biomarkers; 2) cell- or tissue-specific biomarkers; 3) vesicle-specific markers (e.g., general vesicle biomarkers); 4. angiogenesis-specific biomarkers; and 5) immunomodulatory biomarkers. Examples of all such markers are disclosed herein and known to a person having ordinary skill in the art. Furthermore, a biomarker known in the art that is characterized to have a role in a particular disease or condition can be adapted for use as a target in compositions and methods of the invention. In further embodiments, such biomarkers that are associated with vesicles can be all vesicle surface markers, or a combination of vesicle surface markers and vesicle payload markers (i.e., molecules enclosed by a vesicle). The biomarkers assessed can be from a combination of sources. For example, a disease or disorder may be detected or characterized by assessing a combination of proteins, nucleic acids, vesicles, circulating biomarkers, biomarkers from a tissue sample, and the like. In addition, as noted herein, the biological sample assessed can be any biological fluid, or can comprise individual components present within such biological fluid (e.g., vesicles, nucleic acids, proteins, or complexes thereof).

[0328] EpCAM is a pan-epithelial differentiation antigen that is expressed on many tumor cells. It is intricately linked with the Cadherin-Catenin pathway and hence the fundamental WNT pathway responsible for intracellular signalling and polarity. It has been used as an immunotherapeutic target in the treatment of gastrointestinal, urological and other carcinomas. (Chaudry M A, Sales K, Ruf P, Lindhofer H, Winslet M C (April 2007). Br. J. Cancer 96 (7): 1013-9.). It is expressed in undifferentiated pluripotent stem cells. EpCAM is a member of a family that includes at least two type I membrane proteins and functions as a homotypic calcium-independent cell adhesion molecule. Mutations in this gene result in congenital tufting enteropathy. EpCAM has been observed on the surface of microvesicles derived from cancer cell of various lineages. EpCAM is used as an exemplary surface antigen in various examples herein. One of skill will appreciate that various embodiments and examples using EpCAM can be applied to other microvesicle surface antigens as well.

### Therapeutics

[0329] As used herein “therapeutically effective amount” refers to an amount of a composition that relieves (to some extent, as judged by a skilled medical practitioner) one or more symptoms of the disease or condition in a mammal Additionally, by “therapeutically effective amount” of a composition is meant an amount that returns to normal, either partially or completely, physiological or biochemical parameters associated with or causative of a disease or condition. A clinician skilled in the art can determine the therapeutically effective amount of a composition in order to treat or prevent a particular disease condition, or disorder when it is administered, such as intravenously, subcutaneously, intraperitoneally, orally, or through inhalation. The precise amount of the composition required to be therapeutically effective will depend upon numerous factors, e.g., such as the specific activity of the active agent, the delivery device employed, physical characteristics of the agent, purpose for the administration, in addition to many patient specific considerations. But a determination of a therapeutically effective amount is within the skill of an ordinarily skilled clinician upon the appreciation of the disclosure set forth herein.

[0330] The terms “treating,” “treatment,” “therapy,” and “therapeutic treatment” as used herein refer to curative therapy, prophylactic therapy, or preventative therapy. An example of “preventative therapy” is the prevention or lessening the chance of a targeted disease (e.g., cancer or other proliferative disease) or related condition thereto. Those in need of treatment include those already with the disease or condition as well as those prone to have the disease or condition to be prevented. The terms “treating,” “treatment,” “therapy,” and “therapeutic treatment” as used herein also describe the management and care of a mammal for the purpose of combating a disease, or related condition, and includes the administration of a composition to alleviate the symptoms, side effects, or other complications of the disease, condition. Therapeutic treatment for cancer includes, but is not limited to, surgery, chemotherapy, radiation therapy, gene therapy, and immunotherapy.

[0331] As used herein, the term “agent” or “drug” or “therapeutic agent” refers to a chemical compound, a mixture of chemical compounds, a biological macromolecule, or an extract made from biological materials such as bacteria, plants, fungi, or animal (particularly mammalian) cells or tissues that are suspected of having therapeutic properties. The agent or drug can be purified, substantially purified or partially purified. An “agent” according to the present invention, also includes a radiation therapy agent or a “chemotherapuetic agent.”

[0332] As used herein, the term “diagnostic agent” refers to any chemical used in the imaging of diseased tissue, such as, e.g., a tumor.

[0333] As used herein, the term “chemotherapuetic agent” refers to an agent with activity against cancer, neoplastic, and/or proliferative diseases, or that has ability to kill cancerous cells directly.

[0334] As used herein, “pharmaceutical formulations” include formulations for human and veterinary use with no significant adverse toxicological effect. “Pharmaceutically acceptable formulation” as used herein refers to a composition or formulation that allows for the effective distribution of the nucleic acid molecules of the instant invention in the physical location most suitable for their desired activity.

[0335] As used herein the term “pharmaceutically acceptable carrier” is intended to include any and all solvents, dispersion media, coatings, antibacterial and antifungal agents, isotonic and absorption delaying agents, and the like, compatible with pharmaceutical administration. The use of such media and agents for pharmaceutically active substances is well known in the art. Except insofar as any conventional media or agent is incompatible with the active compound, use thereof in the compositions is contemplated.

[0336] Aptamer-Toxin Conjugates as a Cancer Therapeutic

[0337] Extensive previous work has developed the concept of antibody-toxin conjugates (“immunoconjugates”) as potential therapies for a range of indications, mostly directed at the treatment of cancer with a primary focus on hematological tumors. A variety of different payloads for targeted delivery have been tested in pre-clinical and clinical studies, including protein toxins, high potency small molecule cytotoxics, radioisotopes, and liposome-encapsulated drugs. While these efforts have successfully yielded three FDA-approved therapies for hematological tumors, immunoconjugates as a class (especially for solid tumors) have historically yielded disappointing results that have been attributable to multiple different properties of antibodies, including tendencies to develop neutralizing antibody responses to non-humanized antibodies, limited penetration in solid tumors, loss of target binding affinity as a result of toxin conjugation, and imbalances between antibody half-life and toxin conjugate half-life that limit the overall therapeutic index (reviewed by Reff and Heard, Critical Reviews in Oncology/Hematology, 40 (2001):25-35).

[0338] Aptamers are functionally similar to antibodies, except their absorption, distribution, metabolism, and excretion (“ADME”) properties are intrinsically different and they generally lack many of the immune effector functions generally associated with antibodies (e.g., antibody-dependent cellular cytotoxicity, complement-dependent cytotoxicity). In comparing many of the properties of aptamers and antibodies previously described, several factors suggest that toxin-delivery via aptamers offers several concrete advantages over delivery with antibodies, ultimately affording them better potential as therapeutics. Several examples of the advantages of toxin-delivery via aptamers over antibodies are as follows:

[0339] 1) Aptamer-toxin conjugates are entirely chemically synthesized. Chemical synthesis provides more control over the nature of the conjugate. For example, the stoichiometry (ratio of toxins per aptamer) and site of attachment can be precisely defined. Different linker chemistries can be readily tested. The reversibility of aptamer folding means that loss of activity during conjugation is unlikely and provides more flexibility in adjusting conjugation conditions to maximize yields.

[0340] 2) Smaller size allows better tumor penetration. Poor penetration of antibodies into solid tumors is often cited as a factor limiting the efficacy of conjugate approaches. See Colcher, D., Goel, A., Pavlinkova, G., Beresford, G., Booth, B., Batra, S. K. (1999) “Effects of genetic engineering on the pharmacokinetics of antibodies,” Q. J. Nucl. Med., 43: 132-139. Studies comparing the properties of unPEGylated anti-tenascin C aptamers with corresponding antibodies demonstrate efficient uptake into tumors (as defined by the tumor:blood ratio) and evidence that aptamer localized to the tumor is unexpectedly long-lived (t_{1/2}>12 hours) (Hicke, B. J., Stephens, A. W., “Escort aptamers: a delivery service for diagnosis and therapy”, J. Clin. Invest., 106:923-928 (2000)).

[0341] 3) Tunable PK. Aptamer half-life/metabolism can be easily tuned to match properties of payload, optimizing the ability to deliver toxin to the tumor while minimizing systemic exposure. Appropriate modifications to the aptamer backbone and addition of high molecular weight PEGs should make it possible to match the half-life of the aptamer to the intrinsic half-life of the conjugated toxin/linker, minimizing systemic exposure to non-functional toxin-bearing metabolites (expected if t_{1/2}(aptamer)<<t_{1/2}(toxin)) and reducing the likelihood that persisting unconjugated aptamer will functionally block uptake of conjugated aptamer (expected if t_{1/2}(aptamer)>>t_{1/2} (toxin)).

[0342] 4) Relatively low material requirements. It is likely that dosing levels will be limited by toxicity intrinsic to the cytotoxic payload. As such, a single course of treatment will likely entail relatively small (<100 mg) quantities of aptamer, reducing the likelihood that the cost of oligonucleotide synthesis will be a barrier for aptamer-based therapies.

[0343] 5) Parenteral administration is preferred for this indication. There will be no special need to develop alternative formulations to drive patient/physician acceptance.

[0344] The invention provides a pharmaceutical composition comprising a therapeutically effective amount of an aptamer provided by the invention or a salt thereof, and a pharmaceutically acceptable carrier or diluent. The invention also provides a pharmaceutical composition comprising a therapeutically effective amount of the aptamer or a salt thereof, and a pharmaceutically acceptable carrier or diluent. Relatedly, the invention provides a method of treating or ameliorating a disease or disorder, comprising administering the pharmaceutical composition to a subject in need thereof. Administering a therapeutically effective amount of the composition to the subject may result in: (a) an enhancement of the delivery of the active agent to a disease site relative to delivery of the active agent alone; or (b) an enhancement of microvesicles clearance resulting in a decrease of at least 10%, 20%, 30%, 40%, 50%, 60%, 70%, 80%, or 90% in a blood level of microvesicles targeted by the aptamer; or (c) an decrease in biological activity of microvesicles targeted by the aptamer of at least 10%, 20%, 30%, 40%, 50%, 60%, 70%, 80%, or 90%. In an embodiment, the biological activity of microvesicles comprises immune suppression or transfer of genetic information. The disease or disorder can include without limitation those disclosed herein. For example, the disease or disorder may comprise a neoplastic, proliferative, or inflammatory, metabolic, cardiovascular, or neurological disease or disorder. See, e.g., section “Phenotypes.”

### Aptamer Identification Methods

[0345] Nucleic acid sequences fold into secondary and tertiary motifs particular to their nucleotide sequence. These motifs position the positive and negative charges on the nucleic acid sequences in locations that enable the sequences to bind to specific locations on target molecules, e.g., proteins and other amino acid sequences. These binding sequences are known in the field as aptamers. Due to the trillions of possible unique nucleotide sequences in even a relatively short stretch of nucleotides (e.g., 10, 11, 12, 13, 14, 15, 16, 17, 18, 19, 20, 21, 22, 23, 24, 25, 26, 27, 28, 29, 30, 31, 32, 33, 34, 35, 36, 37, 38, 39 or 40 nucleotides), a large variety of motifs can be generated, resulting in aptamers for almost any desired protein or other target.

[0346] Aptamers are created by randomly generating oligonucleotides of a specific length, typically 20-80 base pairs long, e.g., 20, 21, 22, 23, 24, 25, 26, 27, 28, 29, 30, 31, 32, 33, 34, 35, 36, 37, 38, 39, 40, 41, 42, 43, 44, 45, 46, 47, 48, 49, 50, 51, 52, 53, 54, 55, 56, 57, 58, 59, 60, 61, 62, 63, 64, 65, 66, 67, 68, 69, 70, 71, 72, 73, 74, 75, 76, 77, 78, 79 or 80 base pairs. These random oligonucleotides are then incubated with the protein target of interest. After several wash steps, the oligonucleotides that bind to the target are collected and amplified. The amplified aptamers are then added to the target and the process is repeated, often 15-20 times. A common version of this process known to those of skill in the art as the SELEX method.

[0347] The end result comprises one or more aptamer with high affinity to the target. The invention provides further processing of such resulting aptamers that can be use to provide desirable characteristics: 1) competitive binding assays to identify aptamers to a desired epitope; 2) motif analysis to identify high affinity binding aptamers in silico; and 3) microvesicle-based aptamer selection assays to identify aptamers that can be used to detect a particular disease. The methods are described in more detail below and further in the Examples.

[0348] The invention further contemplates aptamer sequences that are highly homologous to the sequences that are discovered by the methods of the invention. “High homology” typically refers to a homology of 40% or higher, preferably 60% or higher, more preferably 80% or higher, even more preferably 85%, 90%, 91%, 92%, 93%, 94%, 95%, 96%, 97%, 98%, 99% or higher between a polynucleotide sequence sequence and a reference sequence. In an embodiment, the reference sequence comprises the sequence of one or more aptamer provided herein. Percent homologies (also referred to as percent identity) are typically carried out between two optimally aligned sequences. Methods of alignment of sequences for comparison are well-known in the art. Optimal alignment of sequences and comparison can be conducted, e.g., using the algorithm in “Wilbur and Lipman, Proc Natl Acad Sci USA 80: 726-30 (1983)”. Homology calculations can also be performed using BLAST, which can be found on the NCBI server at: www.ncbi.nlm.nih.gov/BLAST/(Altschul S F, et al, Nucleic Acids Res. 1997; 25(17):3389-402; Altschul S F, et al, J Mol. Biol. 1990; 215(3):403-10). In the case of an isolated polynucleotide which is longer than or equivalent in length to the reference sequence, e.g., a sequence identified by the methods herein, the comparison is made with the full length of the reference sequence. Where the isolated polynucleotide is shorter than the reference sequence, e.g., shorter than a sequence identified by the methods herein, the comparison is made to a segment of the reference sequence of the same length (excluding any loop required by the homology calculation).

[0349] The invention further contemplates aptamer sequences that are functional fragments of the sequences that are discovered by the methods of the invention. In the context of an aptamer sequence, a “functional fragment” of the aptamer sequence may comprise a subsequence that binds to the same target as the full length sequence. In some instances, a candidate aptamer sequence is from a member of a library that contains a 5′ leader sequences and/or a 3′ tail sequence. Such leader sequences or tail sequences may serve to facilitate primer binding for amplification or capture, etc. In these embodiments, the functional fragment of the full length sequence may comprise the subsequence of the candidate aptamer sequence absent the leader and/or tail sequences.

[0350] Competitive Antibody Addition

[0351] Known aptamer production methods may involve eluting all bound aptamers from the target sequence. In some cases, this is not sufficient to identify the desired aptamer sequence. For example, when trying to replace an antibody in an assay, it may be desirable to only collect aptamers that bind to the specific epitope of the antibody being replaced. The invention provides a method comprising addition of an antibody that is to be replaced to the aptamer/target reaction in order to allow for the selective collection of aptamers which bind to the antibody epitope. In an embodiment, the method comprises incubating a reaction mixture comprising randomly generated oligonucleotides with a target of interest, removing unbound aptamers from the reaction mixture that do not bind the target, adding an antibody to the reaction mixture that binds to that epitope of interest, and collecting the aptamers that are displaced by the antibody. The target can be a protein. See, e.g., FIG. 1, which illustrates the method for identifying an aptamer to a specific epitope of EpCam.

[0352] Motif Analysis

[0353] In most aptamer experiments, multiple aptamer sequences are identified that bind to the target. These aptamers will have various binding affinities. It can be time consuming and laborious to generate quantities of these many aptamers sufficient to assess the affinities of each. To identify large numbers of aptamers with the highest affinities without physically screening large subsets, the invention provides a method comprising the analysis of the two dimensional structure of one or more high affinity aptamers to the target of interest. In an embodiment, the method comprises screening the database for aptamers that have similar two-dimensional structures, or motifs, but not necessarily similar primary sequences. In an embodiment, the method comprises identifying a high affinity aptamer using traditional methods such as disclosed herein or known in the art (e.g. surface plasmon resonance binding assay, see FIG. 5), approximating the two-dimensional structure of the high affinity aptamer, and identifying aptamers from a pool of sequences that are predicted to have a similar two-dimensional structure to the high affinity aptamer. The method thereby provides a pool of candidates that also bind the target of interest. The two-dimensional structure of an oligo can be predicting using methods known in the art, e.g., via free energy (ΔG) calculations performed using a commercially available software program such as Vienna or mFold, for example as described in Mathews, D., Sabina, J., Zucker, M. & Turner, H. Expanded sequence dependence of thermodynamic parameters provides robust prediction of RNA secondary structure. J. Mol. Biol. 288, 911-940 (1999); Hofacker et al., Monatshefte f. Chemie 125: 167-188 (1994); and Hofacker, I. L. Vienna RNA secondary structure server. Nucleic Acids Res. 31, 3429-3431 (2003), the contents of which are incorporated herein by reference in their entirety. See, e.g., FIGS. 3A-3B. The pool of sequences can be sequenced from a pool of randomly generated aptamer candidates using a high-throughput sequencing platform, such as the Ion Torrent platform from Life Technologies. Identifying aptamers from a pool of sequences that are predicted to have a similar two-dimensional structure to the high affinity aptamer may comprise loading the resulting sequences into the software program of choice to identify members of the pool of sequences with similar two-dimensional structures as the high affinity aptamer. The affinities of the pool of sequences can then be determined in situ, e.g., surface plasmon resonance binding assay or the like.

### Aptamer Subtraction Methods

[0354] In order to develop an assay to detect a disease, for example, cancer, one typically screens a large population of known biomarkers from normal and diseased patients in order to identify markers that correlate with disease. This process only works if discriminating markers are already described. In order to address this problem, the invention provides a method comprising subtracting out non-discriminating aptamers from a large pool of aptamers by incubating them initially with non-target microvesicles or cells. The non-target cells can be normal cells or microvesicles shed therefrom. The aptamers that did not bind to the normal microvesicles or cells are then incubated with diseased microvesicles or cells. The aptamers that bind to the diseased microvesicles or cells but that did not bind to the normal cells are then possible candidates for an assay to detect the disease. This process is independent of knowing the existence of a particular marker in the diseased sample.

[0355] Subtraction methods can be used to identify aptamers that preferentially recognize a desired population of targets. In an embodiment, the subtraction method is used to identify aptamers that preferentially recognize target from a diseased target population over a control (e.g., normal or non-diseased) population. The diseased target population may be a population of vesicles from a diseased individual or individuals, whereas the control population comprises vesicles from a non-diseased individual or individuals. The disease can be a cancer or other disease disclosed herein or known in the art. Accordingly, the method provides aptamers that preferentially identify disease targets versus control targets.

[0356] Circulating microvesicles can be isolated from control samples, e.g., plasma from “normal” individuals that are absent a disease of interest, such as an absence of cancer. Vesicles in the sample are isolated using a method disclosed herein or as known in the art. For example, vesicles can be isolated from the plasma by one of the following methods: filtration, ultrafiltration, nanomembrane ultrafiltration, the ExoQuick reagent (System Biosciences, Inc., Mountain View, Calif.), centrifugation, ultracentrifugation, using a molecular crowding reagent (e.g., TEXIS from Life Technologies), polymer precipitation (e.g., polyethylene glycol (PEG)), affinity isolation, affinity selection, immunoprecipitation, chromatography, size exclusion, or a combination of any of these methods. The microvesicles isolated in each case will be a mixture of vesicle types and will be various sizes although ultracentrifugation methods may have more tendency to produce exosomal-sized vesicles. Randomly generated oligonucleotide libraries (e.g., produced as described in the Examples herein) are incubated with the isolated normal vesicles. The aptamers that do not bind to these vesicles are isolated, e.g., by spinning down the vesicles and collecting the supernatant containing the non-binding aptamers. These non-binding aptamers are then contacted with vesicles isolated from diseased patients (e.g., using the same methods as described above) to allow the aptamers to recognize the disease vesicles. Next, aptamers that are bound to the diseased vesicles are collected. In an embodiment, the vesicles are isolated then lysed using a chaotropic agent (e.g., SDS or a similar detergent), and the aptamers are then captured by running the lysis mixture over an affinity column. The affinity column may comprise streptavidin beads in the case of biotin conjugated aptamer pools. The isolated aptamers are the amplified. The process can then then repeated, e.g., 1, 2, 3, 4, 5, 6, 7, 8, 9, 10, 11, 12, 13, 14, 15, 16, 17, 18, 19 or 20 or more times.

[0357] In one aspect of the invention, an aptamer profile is identified that can be used to characterize a biological sample of interest. In an embodiment, a pool of randomly generated oligonucleotides, e.g., at least 10, 10², 10³, 10⁴, 10⁵, 10⁶, 10⁷, 10⁸, 10⁹, 10¹⁰, 10¹¹, 10¹², 10¹³, 10¹⁴, 10¹⁵, 10¹⁶, 10¹⁷, 10¹⁸, 10¹⁹ or at least 10²⁰ oligonucleotides, is contacted with a biological component or target of interest from a control population. The oligonucleotides that do not bind the biological component or target of interest from the control population are isolated and then contacted with a biological component or target of interest from a test population. The oligonucleotides that bind the biological component or target of interest from the test population are retained. The retained oligonucleotides can be used to repeat the process by contacting the retained oligonucleotides with the biological component or target of interest from the control population, isolating the retained oligonucleotides that do not bind the the biological component or target of interest from the control population, and again contacting these isolated oligonucleotides with the biological component or target of interest from the test population and isolating the binding oligonucleotides. The “component” or “target” can be anything that is present in sample to which the oligonucleotides are capable of binding (e.g., polypeptides, peptide, nucleic acid molecules, carbodyhrates, lipids, etc.). The process can then then repeated, e.g., 1, 2, 3, 4, 5, 6, 7, 8, 9, 10, 11, 12, 13, 14, 15, 16, 17, 18, 19 or 20 or more times. The resulting oligonucleotides comprise aptamers that can differentially detect the test population versus the control. These aptamers provide an aptamer profile, which comprises a biosignature that is determined using one or more aptamer, e.g., a biosignature comprising a presense or level of the component or target which is detected using the one or more aptamer.

[0358] An exemplary process is illustrated in FIG. 4, which demonstrates the method to identify aptamer that preferentially recognize cancer vesicles using vesicles from normal (non-cancer) individuals as a control. In the figure, exosomes are exemplified but one of skill will appreciate that other microvesicles can be used in the same manner. The resulting aptamers can provide a profile that can differentially detect the cancer vesicles from the normal vesicles. One of skill will appreciate that the same steps can be used to derive an aptamer profile to characterize any disease or condition of interest.

[0359] In an embodiment, the invention provides an isolated polynucleotide that encodes a polypeptide, or a fragment thereof, identified by the methods above. The invention further provides an isolated polynucleotide having a nucleotide sequence that is at least 60% identical to the nucleotide sequence identified by the methods above. More preferably, the isolated nucleic acid molecule is at least 65%, 70%, 75%, 80%, 85%, 90%, 91%, 92%, 93%, 94%, 95%, 96%, 97%, 98%, 99% or more, identical to the nucleotide sequence identified by the methods above. In the case of an isolated polynucleotide which is longer than or equivalent in length to the reference sequence, e.g., a sequence identified by the methods above, the comparison is made with the full length of the reference sequence. Where the isolated polynucleotide is shorter than the reference sequence, e.g., shorter than a sequence identified by the methods above, the comparison is made to a segment of the reference sequence of the same length (excluding any loop required by the homology calculation).

[0360] In a related aspect, the invention provides a method of characterizing a biological phenotype using an aptamer profile. The aptamer profile can be determined using the method above. The aptamer profile can be determined for a test sample and compared to a control aptamer profile. The phenotype may be a disease or disorder such as a cancer. Characterizing the phenotype can include without limitation providing a diagnosis, prognosis, or theranosis. Thus, the aptamer profile can provide a diagnostic, prognostic and/or theranostic readout for the subject from whom the test sample is obtained.

[0361] In another embodiment, an aptamer profile is determined for a test sample by contacting a pool of aptamer molecules to the test sample, contacting the same pool of aptamers to a control sample, and identifying one or more aptamer molecules that differentially bind a component or target in the test sample but not in the control sample (or vice versa). A “component” or “target” as used in the context of the biological test sample or control sample can be anything that is present in sample to which the aptamers are capable of binding (e.g., polypeptides, peptide, nucleic acid molecules, carbodyhrates, lipids, etc.). For example, if a sample is a plasma or serum sample, the aptamer molecules may bind a polypeptide biomarker that is solely expressed or differentially expressed (over- or underexpressed) in a disease state as compared to a non-diseased subject. Comparison of the aptamer profile in the test sample as compared to the control sample may be based on qualitative and quantitative measure of aptamer binding (e.g., binding versus no binding, or level of binding in test sample versus different level of binding in the reference control sample).

[0362] In an aspect, the invention provides a method of identifying a target-specific aptamer profile, comprising contacting a biological test sample with a pool of aptamer molecules, contacting the pool to a control biological sample, identifying one or more aptamers that bind to a component in said test sample but not to the control sample, thereby identifying an aptamer profile for said biological test sample. In an embodiment, a pool of aptamers is selected against a disease sample and compared to a reference sample, the aptamers in a subset that bind to a component(s) in the disease sample but not in the reference sample can be sequenced using conventional sequencing techniques to identify the subset that bind, thereby identifying an aptamer profile for the particular disease sample. In this way, the aptamer profile provides an individualized platform for detecting disease in other samples that are screened. Furthermore, by selecting an appropriate reference or control sample, the aptamer profile can provide a diagnostic, prognostic and/or theranostic readout for the subject from whom the test sample is obtained.

[0363] In a related aspect, the invention provides a method of selecting a pool of aptamers, comprising: (a) contacting a biological control sample with a pool of oligonucleotides; (b) isolating a first subset of the pool of oligonucleotides that do not bind the biological control sample; (c) contacting the biological test sample with the first subset of the pool of oligonucleotides; and (d) isolating a second subset of the pool of oligonucleotides that bind the biological test sample, thereby selecting the pool of aptamers. The pool of oligonucleotides may comprise any number of desired sequences, e.g., at least 10, 10², 10³, 10⁴, 10⁵, 10⁶, 10⁷, 10⁸, 10⁹, 10¹⁰, 10¹¹, 10¹², 10¹³, 10¹⁴, 10¹⁵, 10¹⁶, 10¹⁷, 10¹⁸, 10¹⁹ or at least 10²⁰ oligonucleotides may be present in the starting pool. Steps (a)-(d) may be repeated to further hone the pool of aptamers. In an embodiment, these steps are repeated at least 1, 2, 3, 4, 5, 6, 7, 8, 9, 10, 11, 12, 13, 14, 15, 16, 17, 18, 19 or at least 20 times.

[0364] As described herein, the biological test sample and biological control sample may comprise microvesicles. In an embodiment, the biological test sample and optionally biological control sample comprise a bodily fluid. The bodily fluid may comprise without limitation peripheral blood, sera, plasma, ascites, urine, cerebrospinal fluid (CSF), sputum, saliva, bone marrow, synovial fluid, aqueous humor, amniotic fluid, cerumen, breast milk, broncheoalveolar lavage fluid, semen, prostatic fluid, Cowper's fluid, pre-ejaculatory fluid, female ejaculate, sweat, fecal matter, hair, tears, cyst fluid, pleural fluid, peritoneal fluid, malignant fluid, pericardial fluid, lymph, chyme, chyle, bile, interstitial fluid, menses, pus, sebum, vomit, vaginal secretions, mucosal secretion, stool water, pancreatic juice, lavage fluids from sinus cavities, bronchopulmonary aspirates or other lavage fluids. The biological test sample and optionally biological control may also comprise a tumor sample, e.g., cells from a tumor or tumor tissue. In other embodiments, the biological test sample and optionally biological control sample comprise a cell culture medium. In embodiments, the biological test sample comprises a diseased sample and the biological control sample comprises a non-diseased sample. Accordingly, the pool of aptamers may be used to provide a diagnostic, prognostic and/or theranostic readout a disease.

[0365] As noted, the invention can be used to assess microvesicles. Microvesicles are powerful biomarkers because the vesicles provide one biological entity that comprises multiple pieces of information. For example as described, a vesicle can have multiple surface antigens, each of which provides complementary information. Consider a cancer marker and a tissue specific marker. If both markers are individually present in a sample, e.g., both are circulating proteins or nucleic acids, it may not be ascertainable whether the cancer marker and the tissue specific marker are derived from the same anatomical locale. However, if both the cancer marker and the tissue specific marker are surface antigens on a single microvesicle, the vesicle itself links the two markers and provides an indication of a disease (via the cancer marker) and origin of the disease (via the tissue specific marker). Furthermore, the vesicle can have any number of surface antigens and also payload that can be assessed. Accordingly, the invention provides a method for identifying binding agents comprising contacting a plurality of extracellular microvesicles with a randomly generated library of binding agents, identifying a subset of the library of binding agents that have an affinity to one or more components of the extracellular microvesicles. The binding agents may comprise aptamers, antibodies, and/or any other useful type of binding agent disclosed herein or known in the art.

[0366] In a related aspect, the invention provides a method for identifying a plurality of target ligands comprising, (a) contacting a reference microvesicle population with a plurality of ligands that are capable of binding one or more microvesicle surface markers, (b) isolating a plurality of reference ligands, wherein the plurality of reference ligands comprise a subset of the plurality of ligands that do not have an affinity for the reference microvesicle population; (c) contacting one or more test microvesicle with the plurality of reference ligands; and (d) identifying a subset of ligands from the the plurality of reference ligands that form complexes with a surface marker on the one or more test microvesicle, thereby identifying the plurality of target ligands. The term “ligand” can refer a molecule, or a molecular group, that binds to another chemical entity to form a larger complex. Accordingly, a binding agent comprises a ligand. The plurality of ligands may comprise aptamers, antibodies and/or other useful binding agents described herein or known in the art.

[0367] The invention further provides kits comprising one or more reagent to carry out the methods above. In an embodiment, the one or more reagent comprises a library of potential binding agents that comprises one or more of an aptamer, antibody, and other useful binding agents described herein or known in the art.

[0368] Negative and Positive Aptamer Selection

[0369] Aptamers can be used in various biological assays, including numerous types of assays which rely on a binding agent. For example, aptamers can be used instead of or along side antibodies in immune-based assays. The invention provides an aptamer screening method that identifies aptamers that do not bind to any surfaces (substrates, tubes, filters, beads, other antigens, etc.) throughout the assay steps and bind specifically to an antigen of interest. The assay relies on negative selection to remove aptamers that bind non-target antigen components of the final assay. The negative selection is followed by positive selection to identify aptamers that bind the desired antigen.

[0370] In an aspect, the invention provides a method of identifying an aptamer specific to a target of interest, comprising (a) contacting a pool of candidate aptamers with one or more assay components, wherein the assay components do not comprise the target of interest; (b) recovering the members of the pool of candidate aptamers that do not bind to the one or more assay components in (a); (c) contacting the members of the pool of candidate aptamers recovered in (b) with the target of interest in the presence of one or more confounding target; and (d) recovering a candidate aptamer that binds to the target of interest in step (c), thereby identifying the aptamer specific to the target of interest. In the method, steps (a) and (b) provide negative selection to remove aptamers that bind non-target entities. Conversely, steps (c) and (d) provide positive selection by identifying aptamers that bind the target of interest but not other confounding targets, e.g., other antigens that may be present in a biological sample which comprises the target of interest. The pool of candidate aptamers may comprise at least 10, 10², 10³, 10⁴, 10⁵, 10⁶, 10⁷, 10⁸, 10⁹, 10¹⁰, 10¹¹, 10¹², 10¹³, 10¹⁴, 10¹⁵, 10¹⁶, 10¹⁷, 10¹⁸, 10¹⁹ or at least 10²⁰ nucleic acid sequences. One illustrative approach for performing the method is provided in Example 7.

[0371] In some embodiments, steps (a)-(b) are optional. In other embodiments, steps (a)-(b) are repeated at least 1, 2, 3, 4, 5, 6, 7, 8, 9, 10, 11, 12, 13, 14, 15, 16, 17, 18, 19 or at least 20 times before positive selection in step (c) is performed. The positive selection can also be performed in multiple rounds. Steps (c)-(d) can be repeated at least 1, 2, 3, 4, 5, 6, 7, 8, 9, 10, 11, 12, 13, 14, 15, 16, 17, 18, 19 or at least 20 times before identifying the aptamer specific to the target of interest. Multiple rounds may provide improved stringency of selection.

[0372] In some embodiments, the one or more assay components contacted with the aptamer pool during negative selection comprise one or more of a substrate, a bead, a planar array, a column, a tube, a well, or a filter. One of skill will appreciate that the assay components can include any substance that may be part of a biological assay.

[0373] The target of interest can be any appropriate entity that can be detected when recognized by an aptamer. In an embodiment, the target of interest comprises a protein or polypeptide. As used herein, “protein,” “polypeptide” and “peptide” are used interchangeably unless stated otherwise. The target of interest can be a nucleic acid, including DNA, RNA, and various subspecies of any thereof as disclosed herein or known in the art. The target of interest can comprise a lipid. The target of interest can comprise a carbohydrate. The target of interest can also be a complex, e.g., a complex comprising protein, nucleic acids, lipids and/or carbohydrates. In some embodiments, the target of interest comprises a microvesicle. In such cases, the aptamer can be a binding agent to a microvesicle surface antigen, e.g., a protein. General microvesicle surface antigens include tetraspanin, CD9, CD63, CD81, CD63, CD9, CD81, CD82, CD37, CD53, Rab-5b, Annexin V, and MFG-E8. Additional general microvesicle surface antigens are provided in Table 3 herein.

[0374] The microvesicle surface antigen can also be a biomarker of a disease or disorder. In such cases, the aptamer may be used to provide a diagnosis, prognosis or theranosis of the disease or disorder. For example, the one or more protein may comprise one or more of PSMA, PCSA, B7H3, EpCam, ADAM-10, BCNP, EGFR, IL1B, KLK2, MMPI, p53, PBP, SERPINB3, SPDEF, SSX2, and SSX4. These markers can be used detect a prostate cancer. Additional microvesicle surface antigens are provided in Tables 3-4 herein.

[0375] The one or more confounding target can be an antigen other than the target of interest. For example, a confounding target can be another entity that may be present in a sample to be assayed. As a non-limiting example, consider that the sample to be assessed is a plasma sample from an individual. The target of interest may be a protein, e.g., a microvesicle surface antigen, which is present in the sample. In this case, a confounding target could be selected from any other antigen that is likely to be present in the plasma sample. Accordingly, the positive selection should provide candidate aptamers that recognize the target of interest but have minimal, if any, interactions with the confounding targets. In some embodiments, the target of interest and the one or more confounding target comprise the same type of biological entity, e.g., all protein, all nucleic acid, all carbohydrate, or all lipids. As a non-limiting example, the target of interest can be a protein selected from the group consisting of SSX4, SSX2, PBP, KLK2, SPDEF, and EpCAM, and the one or more confounding target comprises the other members of this group. In other embodiments, the target of interest and the one or more confounding target comprise different types of biological entities, e.g., any combination of protein, nucleic acid, carbohydrate, and lipids. The one or more confounding targets may also comprise different types of biological entities, e.g., any combination of protein, nucleic acid, carbohydrate, and lipids.

[0376] In an embodiment, the invention provides an isolated polynucleotide, or a fragment thereof, identified by the methods above. The invention further provides an isolated polynucleotide having a nucleotide sequence that is at least 60% identical to the nucleotide sequence identified by the methods above. More preferably, the isolated nucleic acid molecule is at least 65%, 70%, 75%, 80%, 85%, 90%, 91%, 92%, 93%, 94%, 95%, 96%, 97%, 98%, 99% or more, identical to the nucleotide sequence identified by the methods above. In the case of an isolated polynucleotide which is longer than or equivalent in length to the reference sequence, e.g., a sequence identified by the methods above, the comparison is made with the full length of the reference sequence. Where the isolated polynucleotide is shorter than the reference sequence, e.g., shorter than a sequence identified by the methods above, the comparison is made to a segment of the reference sequence of the same length (excluding any loop required by the homology calculation).

[0377] In a related aspect, the invention provides a method of selecting a group of aptamers, comprising: (a) contacting a pool of aptamers to a population of microvesicles from a first sample; (b) enriching a subpool of aptamers that show affinity to the population of microvesicles from the first sample; (c) contacting the subpool to a second population of microvesicles from a second sample; and (d) depleting a second subpool of aptamers that show affinity to the second population of microvesicles from the second sample, thereby selecting the group of aptamers that have preferential affinity for the population of microvesicles from the first sample.

[0378] The first sample and/or second sample may comprise a biological fluid such as disclosed herein. For example, the biological fluid may include without limitation blood, a blood derivative, plasma, serum or urine. The first sample and/or second sample may also be derived from a cell culture.

[0379] In an embodiment, the first sample comprises a cancer sample and the second sample comprises a control sample, such as a non-cancer sample. The first sample and/or and the second sample may each comprise a pooled sample. For example, the first sample and/or second sample can comprise bodily fluid from 2, 3, 4, 5, 6, 7, 8, 9, 10, 11, 12, 13, 14, 15, 16, 17, 18, 19, 20, 25, 30, 40, 50, 60, 70, 80, 90, 100 or more than 100 individuals. In such cases, the members of a pool may be chosen to represent a desired phenotype. In a non-limiting example, the members of the first sample pool may be from patients with a cancer and the members of the second sample pool may be from non-cancer controls.

[0380] Steps (a)-(d) can be repeated a desired number of times in order to further enrich the pool in aptamers that have preferential affinity for the population of microvesicles from the first sample. For example, steps (a)-(d) can be repeated 1, 2, 3, 4, 5, 6, 7, 8, 9, 10, 11, 12, 13, 14, 15, 16, 17, 18, 19, 20 or more than 20 times. The output from step (d) can be used as the input to repeated step (a). In embodiment, the first sample and/or second sample are replaced with a different sample before repeating steps (a)-(d). In a non-limiting example, members of a first sample pool may be from patients with a cancer and members of a second sample pool may be from non-cancer controls. During subsequent repetitions of steps (a)-(d), the first sample pool may comprise samples from different cancer patients than in the prior round/s. Similarly, the second sample pool may comprise samples from different controls than in the prior round/s.

[0381] In still another related aspect, the invention provides a method of enriching a plurality of oligonucleotides, comprising: (a) contacting a first microvesicle population with the plurality of oligonucleotides; (b) fractionating the first microvesicle population contacted in step (a) and recovering members of the plurality of oligonucleotides that fractionated with the first microvesicle population; (c) contacting the recovering members of the plurality of oligonucleotides from step (b) with a second microvesicle population; (d) fractionating the second microvesicle population contacted in step (c) and recovering members of the plurality of oligonucleotides that did not fractionate with the second microvesicle population; (e) contacting the recovering members of the plurality of oligonucleotides from step (d) with a third microvesicle population; and (f) fractionating the third microvesicle population contacted in step (a) and recovering members of the plurality of oligonucleotides that fractionated with the third microvesicle population; thereby enriching the plurality of oligonucleotides. The first and third microvesicle populations may have a first phenotype while the second microvesicle population has a second phenotype. Thus, positive selection occurs for the microvesicle populations associated with the first phenotype and negative selection occurs for the microvesicle populations associated with the second phenotype. An example of such selection schemes is described in Example 27 herein, wherein the first phenotype comprises biopsy-positive breast cancer and the second phenotype comprises non-breast cancer (biopsy-negative or healthy).

[0382] In some embodiments, the first phenotype comprises a medical condition, disease or disorder and the second phenotype comprises a healthy state or a different state of the medical condition, disease or disorder. The first phenotype can be a healthy state and the second phenotype comprises a medical condition, disease or disorder. The medical condition, disease or disorder can be any detectable medical condition, disease or disorder, including without limitation a cancer, a premalignant condition, an inflammatory disease, an immune disease, an autoimmune disease or disorder, a cardiovascular disease or disorder, neurological disease or disorder, infectious disease or pain. Various types of such conditions are disclosed herein. See, e.g., Section “Phenotypes” herein.

[0383] Any useful method to isolate microvesicles in whole or in part can be used to fractionate the samples. See, e.g., Section “Microvesicle Isolation and Analysis” herein. In an embodiment, the fractionating comprises ultracentrifugation in step (b) and polymer precipitation in steps (d) and (f). The polymer can be polyethylene glycol (PEG). Any appropriate form of PEG may be used. For example, the PEG may be PEG 8000. The PEG may be used at any appropriate concentration. For example, the PEG can be used at a concentration of 1%, 2%, 3%, 4%, 5%, 6%, 7%, 8%, 9%, 10%, 11%, 12%, 13%, 14% or 15% to isolate the microvesicles. In some embodiments, the PEG is used at a concentration of 6%.

[0384] The contacting can be performed in the presence of a competitor, which may reduce non-specific binding events. Any useful competitor can be used. In an embodiment, the competitor comprises at least one of salmon sperm DNA, tRNA, dextran sulfate and carboxymethyl dextran. As desired, different competitors or competitor concentrations can be used at different contacting steps.

[0385] The method can be repeated to achieve a desired enrichment. In an embodiment, steps (a)-(f) are repeated at least once. These steps can be repeated 1, 2, 3, 4, 5, 6, 7, 8, 9, 10, 11, 12, 13, 14, 15, 16, 17, 18, 19, 20, or more than 20 times as desired. At the same time, each of the contacting steps can be repeated as desired. In some embodiments, the method further comprises: (i) repeating steps (a)-(b) at least once prior to step (c), wherein the recovered members of the plurality of oligonucleotides that fractionated with the first microvesicle population in step (b) are used as the input plurality of oligonucleotides for the repetition of step (a); (ii) repeating steps (c)-(d) at least once prior to step (e), wherein the recovered members of the plurality of oligonucleotides that did not fractionate with the second microvesicle population in step (d) are used as the input plurality of oligonucleotides for the repetition of step (c); and/or (iii) repeating steps (e)-(f) at least once, wherein the recovered members of the plurality of oligonucleotides that fractionated with the third microvesicle population in step (f) are used as the input plurality of oligonucleotides for the repetition of step (e). Repetitions (i)-(iii) can be repeated any desired number of times, e.g., (i)-(iii) can be repeated 1, 2, 3, 4, 5, 6, 7, 8, 9, 10, 11, 12, 13, 14, 15, 16, 17, 18, 19, 20 or more than 20 times. In an embodiment, (i)-(iii) each comprise three repetitions.

[0386] The method may further comprise identifying the members of the selected group of aptamers or oligonucleotides, e.g., by DNA sequencing. The sequencing may be performed by Next Generation sequencing as desired and after or before any desired step in the method.

[0387] The method may also comprise identifying the targets of the selected group of aptamers/oligonucleotides. Methods to identify such targets are disclosed herein.

### Oligonucleotide Probe Target Identification

[0388] The methods and kits above can be used to identify binding agents that differentiate between two biomarker populations. The invention further provides methods of identifying the targets of binding agent. For example, the methods may further comprise identifying a surface marker of a target microvesicle that is recognized by the binding agent.

[0389] In an embodiment, the invention provides a method of identifying a target of a binding agent comprising: (a) contacting the binding agent with the target to bind the target with the binding agent, wherein the target comprises a surface antigen of a microvesicle; (b) disrupting the microvesicle under conditions which do not disrupt the binding of the target with the binding agent; (c) isolating the complex between the target and the binding agent; and (d) identifying the target bound by the binding agent. The binding agent can be a binding agent identified by the methods above, e.g., an aptamer, ligand, antibody, or other useful binding agent that can differentiate between two populations of biomarkers.

[0390] An illustrative schematic for carrying on the method is shown in FIG. 9. The figure shows a binding agent 902, here an oligonucleotide probe or aptamer for purposes of illustration, tethered to a substrate 901. The binding agent 902 can be covalently attached to substrate 901. The binding agent 902 may also be non-covalently attached. For example, binding agent 902 can comprise a label which can be attracted to the substrate, such as a biotin group which can form a complex with an avidin/streptavidin molecule that is covalently attached to the substrate. This can allow a complex to be formed between the aptamer and the microvesicle while in solution, followed by capture of the aptamer using the biotin label. The binding agent 902 binds to a surface antigen 903 of microvesicle 904. In the step signified by arrow (i), the microvesicle is disrupted while leaving the complex between the binding agent 902 and surface antigen 903 intact. Disrupted microvesicle 905 is removed, e.g., via washing or buffer exchange, in the step signified by arrow (ii). In the step signified by arrow (iii), the surface antigen 903 is released from the binding agent 902. The surface antigen 903 can be analyzed to determine its identity using methods disclosed herein and/or known in the art. The target of the method can be any useful biological entity associated with a microvesicle. For example, the target may comprise a protein, nucleic acid, lipid or carbohydrate, or other biological entity disclosed herein or known in the art.

[0391] In some embodiments of the method, the target is cross-linked to the binding agent prior disrupting the microvesicle. Without being bound by theory, this step may assist in maintaining the complex between the binding agent and the target while the vesicle is disrupted. Any useful method of crosslinking disclosed herein or known in the art can be used. In embodiments, the cross-linking comprises photocrosslinking, an imidoester crosslinker, dimethyl suberimidate, an N-Hydroxysuccinimide-ester crosslinker, bissulfosuccinimidyl suberate (BS3), an aldehyde, acrolein, crotonaldehyde, formaldehyde, a carbodiimide crosslinker, N,N′-dicyclohexylcarbodiimide (DDC), N,N′-diisopropylcarbodiimide (DIC), 1-Ethyl-3-[3-dimethylaminopropyl]carbodiimide hydrochloride (EDC or EDAC), Succinimidyl-4-(N-maleimidomethyl)cyclohexane-1-carboxylate (SMCC), a Sulfosuccinimidyl-4-(N-maleimidomethyl)cyclohexane-1-carboxylate (Sulfo-SMCC), a Sulfo-N-hydroxysuccinimidyl-2-(6-[biotinamido]-2-(p-azido benzamido)-hexanoamido) ethyl-1,3′-dithioproprionate (Sulfo-SBED), 2-[N2-(4-Azido-2,3,5,6-tetrafluorobenzoyl)-N6-(6-biotin-amidocaproyl)-L-lysinyl]ethyl methanethiosulfonate (Mts-Atf-Biotin; available from Thermo Fisher Scientific Inc, Rockford IL.), 2-{N2-[N6-(4-Azido-2,3,5,6-tetrafluorobenzoyl-6-amino-caproyl)-N6-(6-biotinamidocaproyl)-L-lysinylamido]} ethyl methanethiosultonate (Mts-Atf-LC-Biotin; available from Thermo Fisher Scientific Inc), a photoreactive amino acid (e.g., L-Photo-Leucine and L-Photo-Methionine, see, e.g., Suchanek, M., et al. (2005). Photo-leucine and photo-methionine allow identification of protein-protein interactions. Nat. Methods 2:261-267), an N-Hydroxysuccinimide (NHS) crosslinker, an NHS-Azide reagent (e.g., NHS-Azide, NHS-PEG4-Azide, NHS-PEG12-Azide; each available from Thermo Fisher Scientific, Inc.), an NHS-Phosphine reagent (e.g., NHS-Phosphine, Sulfo-NHS-Phosphine; each available from Thermo Fisher Scientific, Inc.), or any combination or modification thereof.

[0392] A variety of methods can be used to disrupt the microvesicle. For example, the vesicle membrane can be disrupted using mechanical forces, chemical agents, or a combination thereof. In embodiments, disrupting the microvesicle comprises use of one or more of a detergent, a surfactant, a solvent, an enzyme, or any useful combination thereof. The enzyme may comprise one or more of lysozyme, lysostaphin, zymolase, cellulase, mutanolysin, a glycanase, a protease, and mannase. The detergent or surfactant may comprise one or more of a octylthioglucoside (OTG), octyl beta-glucoside (OG), a nonionic detergent, Triton X, Tween 20, a fatty alcohol, a cetyl alcohol, a stearyl alcohol, cetostearyl alcohol, an oleyl alcohol, a polyoxyethylene glycol alkyl ether (Brij), octaethylene glycol monododecyl ether, pentaethylene glycol monododecyl ether, a polyoxypropylene glycol alkyl ether, a glucoside alkyl ether, decyl glucoside, lauryl glucoside, octyl glucoside, a polyoxyethylene glycol octylphenol ethers, a polyoxyethylene glycol alkylphenol ether, nonoxynol-9, a glycerol alkyl ester, glyceryl laurate, a polyoxyethylene glycol sorbitan alkyl esters, polysorbate, a sorbitan alkyl ester, cocamide MEA, cocamide DEA, dodecyldimethylamine oxide, a block copolymers of polyethylene glycol and polypropylene glycol, poloxamers, polyethoxylated tallow amine (POEA), a zwitterionic detergent, 3-[(3-cholamidopropyl)dimethylammonio]-1-propanesulfonate (CHAPS), a linear alkylbenzene sulfonate (LAS), a alkyl phenol ethoxylate (APE), cocamidopropyl hydroxysultaine, a betaine, cocamidopropyl betaine, lecithin, an ionic detergent, sodium dodecyl sulfate (SDS), cetrimonium bromide (CTAB), cetyl trimethylammonium chloride (CTAC), octenidine dihydrochloride, cetylpyridinium chloride (CPC), benzalkonium chloride (BAC), benzethonium chloride (BZT), 5-Bromo-5-nitro-1,3-dioxane, dimethyldioctadecylammonium chloride, dioctadecyldimethylammonium bromide (DODAB), sodium deoxycholate, nonyl phenoxypolyethoxylethanol (Tergitol-type NP-40; NP-40), ammonium lauryl sulfate, sodium laureth sulfate (sodium lauryl ether sulfate (SLES)), sodium myreth sulfate, an alkyl carboxylate, sodium stearate, sodium lauroyl sarcosinate, a carboxylate-based fluorosurfactant, perfluorononanoate, perfluorooctanoate (PFOA or PFO), and a biosurfactant. Mechanical methods of disruption that can be used comprise without limitation mechanical shear, bead milling, homogenation, microfluidization, sonication, French Press, impingement, a colloid mill, decompression, osmotic shock, thermolysis, freeze-thaw, desiccation, or any combination thereof.

[0393] As shown in FIG. 9, the binding agent may be tethered to a substrate. The binding agent can be tethered before or after the complex between the binding agent and target is formed. The substrate can be any useful substrate such as disclosed herein or known in the art. In an embodiment, the substrate comprises a microsphere. In another embodiment, the substrate comprises a planar substrate. The binding agent can also be labeled. Isolating the complex between the target and the binding agent may comprise capturing the binding agent via the label. For example, the label can be a biotin label. In such cases, the binding agent can be attached to the substrate via a biotin-avidin binding event.

[0394] Methods of identifying the target after release from the binding agent will depend on the type of target of interest. For example, when the target comprises a protein, identifying the target may comprise use of mass spectrometry (MS), peptide mass fingerprinting (PMF; protein fingerprinting), sequencing, N-terminal amino acid analysis, C-terminal amino acid analysis, Edman degradation, chromatography, electrophoresis, two-dimensional gel electrophoresis (2D gel), antibody array, and immunoassay. Nucleic acids can be identified by sequencing.

[0395] One of skill will appreciate that the method can be used to identify any appropriate target, including those not associated with a vesicle. For example, with respect to the FIG. 9, all steps except for the step signified by arrow (i) (i.e., disrupting the microvesicle), could be performed for a circulating target such as a protein, nucleic acid, lipid, carbohydrate, or combination thereof. The target can be any useful target, including without limitation a cell, an organelle, a protein complex, a lipoprotein, a carbohydrate, a microvesicle, a virus, a membrane fragment, a small molecule, a heavy metal, a toxin, a drug, a nucleic acid, mRNA, microRNA, a protein-nucleic acid complex, and various combinations, fragments and/or complexes of any of these.

[0396] In an aspect, the invention provides a method of identifying at least one protein associated with at least one microvesicle in a biological sample, comprising: a) contacting the at least one microvesicle with an oligonucleotide probe library, b) isolating at least one protein bound by at least one member of the oligonucleotide probe library in step a); and c) identifying the at least one protein isolated in step b). The isolating can be performed using any useful method such as disclosed herein, e.g., by immunopreciption or capture to a substrate. Similarly, the identifying can be performed using any useful method such as disclosed herein, including without limitation use of mass spectrometry, 2-D gel electrophoresis or an antibody array. Examples of such methodology are presented herein in Examples 26-30.

[0397] The targets identified by the methods of the invention can be detected, e.g., using the oligonucleotide probes of the invention, for various purposes as desired. For example, an identified microvesicle surface antigen can then be used to detect a microvesicle. In an aspect, the invention provides a method of detecting at least one microvesicle in a biological sample comprising contacting the biological sample with at least one binding agent to at least one microvesicle surface antigen and detecting the at least one microvesicle recognized by the binding agent to the at least one protein. In an embodiment, the at least one microvesicle surface antigen is selected from Tables 3-4 herein. The at least one microvesicle surface antigen can be a protein in any of Tables 22-34. See Examples 26-30. The at least one binding agent may comprise any useful binding agent, including without limitation a nucleic acid, DNA molecule, RNA molecule, antibody, antibody fragment, aptamer, peptoid, zDNA, peptide nucleic acid (PNA), locked nucleic acid (LNA), lectin, peptide, dendrimer, membrane protein labeling agent, chemical compound, or a combination thereof. In some embodiments, the at least one binding agent comprises at least one oligonucleotide, such as an oligonucleotide probe as provided herein.

[0398] The at least one binding agent can be used to capture and/or detect the at least one microvesicle. Methods of detecting biomarkers and microvesicle using binding agents are provided herein. See, e.g., FIGS. 2A-B, which figures describe sandwich assay formats. In some embodiments, the at least one binding agent used to capture the at least one microvesicle is bound to a substrate. Any useful substrate can be used, including without limitation a planar array, a column matrix, or a microbead. See, e.g., FIGS. 2A-B. In some embodiments, the at least one binding agent used to detect the at least one microvesicle is labeled. Various useful labels are provided herein or known in the art, including without limitation a magnetic label, a fluorescent moiety, an enzyme, a chemiluminescent probe, a metal particle, a non-metal colloidal particle, a polymeric dye particle, a pigment molecule, a pigment particle, an electrochemically active species, a semiconductor nanocrystal, a nanoparticle, a quantum dot, a gold particle, a fluorophore, or a radioactive label.

[0399] In an embodiment, the detecting is used to characterize a phenotype. The phenotype can be any appropriate phenotype of interest. In some embodiments, the phenotype is a disease or disorder. The characterizing may comprise providing diagnostic, prognostic and/or theranostic information for the disease or disorder. The characterizing may be performed by comparing a presence or level of the at least one microvesicle to a reference. The reference can be selected per the characterizing to be performed. For example, when the phenotype comprises a disease or disorder, the reference may comprise a presence or level of the at least one microvesicle in a sample from an individual or group of individuals without the disease or disorder. The comparing can be determining whether the presence or level of the microvesicle differs from that of the reference. In some embodiments, the detected at least one microvesicle is found at higher levels in a healthy sample as compared to a diseased sample. In another embodiment, the detected at least one microvesicle is found at higher levels in a diseased sample as compared to a healthy sample. When multiplex assays are performed, e.g., using a plurality of binding agents to different biomarkers, some microvesicle antigens may be observed at a higher level in the biological samples as compared to the reference whereas other microvesicle antigens may be observed at a lower level in the biological samples as compared to the reference.

[0400] The method can be used to detect the at least one microvesicle in any appropriate biological sample. For example, the biological sample may comprise a bodily fluid, tissue sample or cell culture. The bodily fluid or tissue sample can be from a subject having or suspected of having a medical condition, a disease or a disorder. Thus, the method can be used to provide a diagnostic, prognostic, or theranostic read out for the subject. Any appropriate bodily fluid can be used, including without limitation peripheral blood, sera, plasma, ascites, urine, cerebrospinal fluid (CSF), sputum, saliva, bone marrow, synovial fluid, aqueous humor, amniotic fluid, cerumen, breast milk, broncheoalveolar lavage fluid, semen, prostatic fluid, cowper's fluid or pre-ejaculatory fluid, female ejaculate, sweat, fecal matter, hair oil, tears, cyst fluid, pleural and peritoneal fluid, pericardial fluid, lymph, chyme, chyle, bile, interstitial fluid, menses, pus, sebum, vomit, vaginal secretions, mucosal secretion, stool water, pancreatic juice, lavage fluids from sinus cavities, bronchopulmonary aspirates, blastocyl cavity fluid, or umbilical cord blood.

[0401] The method of the invention can be used to detect or characterize any appropriate disease or disorder of interest, including without limitation Breast Cancer, Alzheimer's disease, bronchial asthma, Transitional cell carcinoma of the bladder, Giant cellular osteoblastoclastoma, Brain Tumor, Colorectal adenocarcinoma, Chronic obstructive pulmonary disease (COPD), Squamous cell carcinoma of the cervix, acute myocardial infarction (AMI)/acute heart failure, Chron's Disease, diabetes mellitus type II, Esophageal carcinoma, Squamous cell carcinoma of the larynx, Acute and chronic leukemia of the bone marrow, Lung carcinoma, Malignant lymphoma, Multiple Sclerosis, Ovarian carcinoma, Parkinson disease, Prostate adenocarcinoma, psoriasis, Rheumatoid Arthritis, Renal cell carcinoma, Squamous cell carcinoma of skin, Adenocarcinoma of the stomach, carcinoma of the thyroid gland, Testicular cancer, ulcerative colitis, or Uterine adenocarcinoma.

[0402] In some embodiments, the disease or disorder comprises a cancer, a premalignant condition, an inflammatory disease, an immune disease, an autoimmune disease or disorder, a cardiovascular disease or disorder, neurological disease or disorder, infectious disease or pain. The cancer can include without limitation one of acute lymphoblastic leukemia; acute myeloid leukemia; adrenocortical carcinoma; AIDS-related cancers; AIDS-related lymphoma; anal cancer; appendix cancer; astrocytomas; atypical teratoid/rhabdoid tumor; basal cell carcinoma; bladder cancer; brain stem glioma; brain tumor (including brain stem glioma, central nervous system atypical teratoid/rhabdoid tumor, central nervous system embryonal tumors, astrocytomas, craniopharyngioma, ependymoblastoma, ependymoma, medulloblastoma, medulloepithelioma, pineal parenchymal tumors of intermediate differentiation, supratentorial primitive neuroectodermal tumors and pineoblastoma); breast cancer; bronchial tumors; Burkitt lymphoma; cancer of unknown primary site; carcinoid tumor; carcinoma of unknown primary site; central nervous system atypical teratoid/rhabdoid tumor; central nervous system embryonal tumors; cervical cancer; childhood cancers; chordoma; chronic lymphocytic leukemia; chronic myelogenous leukemia; chronic myeloproliferative disorders; colon cancer; colorectal cancer; craniopharyngioma; cutaneous T-cell lymphoma; endocrine pancreas islet cell tumors; endometrial cancer; ependymoblastoma; ependymoma; esophageal cancer; esthesioneuroblastoma; Ewing sarcoma; extracranial germ cell tumor; extragonadal germ cell tumor; extrahepatic bile duct cancer; gallbladder cancer; gastric (stomach) cancer; gastrointestinal carcinoid tumor; gastrointestinal stromal cell tumor; gastrointestinal stromal tumor (GIST); gestational trophoblastic tumor; glioma; hairy cell leukemia; head and neck cancer; heart cancer; Hodgkin lymphoma; hypopharyngeal cancer; intraocular melanoma; islet cell tumors; Kaposi sarcoma; kidney cancer; Langerhans cell histiocytosis; laryngeal cancer; lip cancer; liver cancer; lung cancer; malignant fibrous histiocytoma bone cancer; medulloblastoma; medulloepithelioma; melanoma; Merkel cell carcinoma; Merkel cell skin carcinoma; mesothelioma; metastatic squamous neck cancer with occult primary; mouth cancer; multiple endocrine neoplasia syndromes; multiple myeloma; multiple myeloma/plasma cell neoplasm; mycosis fungoides; myelodysplastic syndromes; myeloproliferative neoplasms; nasal cavity cancer; nasopharyngeal cancer; neuroblastoma; Non-Hodgkin lymphoma; nonmelanoma skin cancer; non-small cell lung cancer; oral cancer; oral cavity cancer; oropharyngeal cancer; osteosarcoma; other brain and spinal cord tumors; ovarian cancer; ovarian epithelial cancer; ovarian germ cell tumor; ovarian low malignant potential tumor; pancreatic cancer; papillomatosis; paranasal sinus cancer; parathyroid cancer; pelvic cancer; penile cancer; pharyngeal cancer; pineal parenchymal tumors of intermediate differentiation; pineoblastoma; pituitary tumor; plasma cell neoplasm/multiple myeloma; pleuropulmonary blastoma; primary central nervous system (CNS) lymphoma; primary hepatocellular liver cancer; prostate cancer; rectal cancer; renal cancer; renal cell (kidney) cancer; renal cell cancer; respiratory tract cancer; retinoblastoma; rhabdomyosarcoma; salivary gland cancer; Sézary syndrome; small cell lung cancer; small intestine cancer; soft tissue sarcoma; squamous cell carcinoma; squamous neck cancer; stomach (gastric) cancer; supratentorial primitive neuroectodermal tumors; T-cell lymphoma; testicular cancer; throat cancer; thymic carcinoma; thymoma; thyroid cancer; transitional cell cancer; transitional cell cancer of the renal pelvis and ureter; trophoblastic tumor; ureter cancer; urethral cancer; uterine cancer; uterine sarcoma; vaginal cancer; vulvar cancer; Waldenström macroglobulinemia; or Wilm's tumor. The premalignant condition can include without limitation Barrett's Esophagus. The autoimmune disease can include without limitation one of inflammatory bowel disease (IBD), Crohn's disease (CD), ulcerative colitis (UC), pelvic inflammation, vasculitis, psoriasis, diabetes, autoimmune hepatitis, multiple sclerosis, myasthenia gravis, Type I diabetes, rheumatoid arthritis, psoriasis, systemic lupus erythematosis (SLE), Hashimoto's Thyroiditis, Grave's disease, Ankylosing Spondylitis Sjogrens Disease, CREST syndrome, Scleroderma, Rheumatic Disease, organ rejection, Primary Sclerosing Cholangitis, or sepsis. The cardiovascular disease can include without limitation one of atherosclerosis, congestive heart failure, vulnerable plaque, stroke, ischemia, high blood pressure, stenosis, vessel occlusion or a thrombotic event. The neurological disease can include without limitation one of Multiple Sclerosis (MS), Parkinson's Disease (PD), Alzheimer's Disease (AD), schizophrenia, bipolar disorder, depression, autism, Prion Disease, Pick's disease, dementia, Huntington disease (HD), Down's syndrome, cerebrovascular disease, Rasmussen's encephalitis, viral meningitis, neurospsychiatric systemic lupus erythematosus (NPSLE), amyotrophic lateral sclerosis, Creutzfeldt-Jacob disease, Gerstmann-Straussler-Scheinker disease, transmissible spongiform encephalopathy, ischemic reperfusion damage (e.g. stroke), brain trauma, microbial infection, or chronic fatigue syndrome. The pain can include without limitation one of fibromyalgia, chronic neuropathic pain, or peripheral neuropathic pain. The infectious disease can include without limitation one of a bacterial infection, viral infection, yeast infection, Whipple's Disease, Prion Disease, cirrhosis, methicillin-resistant staphylococcus aureus, HIV, HCV, hepatitis, syphilis, meningitis, malaria, tuberculosis, or influenza. One of skill will appreciate that oligonucleotide probes or plurality of oligonucleotides or methods of the invention can be used to assess any number of these or other related diseases and disorders.

[0403] In a related aspect, the invention provides a kit comprising a reagent for carrying out the methods herein. In still another related aspect, the invention provides for use of a reagent for carrying out the methods. The reagent may comprise at least one binding agent to the at least one protein. The binding agent may be an oligonucleotide probe as provided herein.

[0404] Sample Characterization

[0405] The aptamers of the invention can be used to characterize a biological sample. For example, an aptamer can be used to bind a biomarker in the sample. The presence or level of the bound biomarker can indicate a characteristic of the example, such as a diagnosis, prognosis or theranosis of a disease or disorder associated with the sample.

[0406] In an aspect, the invention provides an aptamer comprising a nucleic acid sequence that is at least about 50, 55, 60, 65, 70, 75, 80, 85, 90, 95, 96, 97, 98, 99 or 100 percent homologous of any of: a) SEQ ID NOs. 11-24 or Table 8; a) SEQ ID NOs. 25-44 or Table 11; b) SEQ ID NOs. 49-132 or Table 12; or c) a functional variation or fragment of any preceding sequence. A functional variation or fragment includes a sequence comprising modifications that is still capable of binding a target molecule, wherein the modifications comprise without limitation at least one of a deletion, insertion, point mutation, truncation or chemical modification. In a related aspect, the invention provides a method of characterizing a disease or disorder, comprising: (a) contacting a biological test sample with one or more aptamer of the invention, e.g., any of those in this paragraph or modifications thereof; (b) detecting a presence or level of a complex between the one or more aptamer and the target bound by the one or more aptamer in the biological test sample formed in step (a); (c) contacting a biological control sample with the one or more aptamer; (d) detecting a presence or level of a complex between the one or more aptamer and the target bound by the one or more aptamer in the biological control sample formed in step (c); and (e) comparing the presence or level detected in steps (b) and (d), thereby characterizing the disease or disorder.

[0407] The biological test sample and biological control sample can each comprise a tissue sample, a cell culture, or a biological fluid. In some embodiments, the biological test sample and biological control sample comprise the same sample type, e.g., both are tissue samples or both are fluid samples. In other embodiments, different sample types may be used for the test and control samples. For example, the control sample may comprise an engineered or otherwise artificial sample.

[0408] The biological fluid may comprise a bodily fluid. The bodily fluid may include without limitation one or more of peripheral blood, sera, plasma, ascites, urine, cerebrospinal fluid (CSF), sputum, saliva, bone marrow, synovial fluid, aqueous humor, amniotic fluid, cerumen, breast milk, broncheoalveolar lavage fluid, semen, prostatic fluid, cowper's fluid or pre-ejaculatory fluid, female ejaculate, sweat, fecal matter, hair, tears, cyst fluid, pleural and peritoneal fluid, pericardial fluid, lymph, chyme, chyle, bile, interstitial fluid, menses, pus, sebum, vomit, vaginal secretions, mucosal secretion, stool water, pancreatic juice, lavage fluids from sinus cavities, bronchopulmonary aspirates, blastocyl cavity fluid, or umbilical cord blood. In some embodiments, the bodily fluid comprises blood, serum or plasma.

[0409] The biological fluid may comprise microvesicles. For example, the biological fluid can be a tissue, cell culture, or bodily fluid which comprises microvesicles released from cells in the sample. The microvesicles can be circulating microvesicles.

[0410] The one or more aptamer can bind a target biomarker, e.g., a biomarker useful in characterizing the sample. The biomarker may comprise a polypeptide or fragment thereof, or other useful biomarker described herein or known in the art (lipid, carbohydrate, complex, nucleic acid, etc). In embodiments, the polypeptide or fragment thereof is soluble or membrane bound. Membrane bound polypeptides may comprise a cellular surface antigen or a microvesicle surface antigen. The biomarker can be a biomarker selected from Table 3 or Table 4.

[0411] The characterizing can comprises a diagnosis, prognosis or theranosis of the disease or disorder. Various diseases and disorders can be characterized using the compositions and methods of the invention, including without limitation a cancer, a premalignant condition, an inflammatory disease, an immune disease, an autoimmune disease or disorder, a cardiovascular disease or disorder, a neurological disease or disorder, an infectious disease, and/or pain. See, e.g., section herein “Phenotypes” for further details. In embodiments, the disease or disorder comprises a proliferative or neoplastic disease or disorder. For example, the disease or disorder can be a cancer. In some embodiments, the cancer comprises a breast cancer, ovarian cancer, prostate cancer, lung cancer, colorectal cancer, melanoma, or brain cancer.

[0412] FIG. 19A is a schematic 1900 showing an assay configuration that can be used to detect and/or quantify a target of interest using one or more aptamer of the invention. Capture aptamer 1902 is attached to substrate 1901. The substrate can be a planar substrate, well, microbead, or other useful substrate as disclosed herein or known in the art. Target of interest 1903 is bound by capture aptamer 1902. The target of interest can be any appropriate entity that can be detected when recognized by an aptamer or other binding agent. The target of interest may comprise a protein or polypeptide, a nucleic acid, including DNA, RNA, and various subspecies thereof, a lipid, a carbohydrate, a complex, e.g., a complex comprising protein, nucleic acids, lipids and/or carbohydrates. In some embodiments, the target of interest comprises a microvesicle. The target of interest can be a microvesicle surface antigen. The target of interest may be a biomarker, including a vesicle associated biomarker, in Tables 3 or 4. The microvesicle input can be isolated from a sample using various techniques as described herein, e.g., chromatography, filtration, centrifugation, flow cytometry, affinity capture (e.g., to a planar surface, column or bead), and/or using microfluidics. Detection aptamer 1904 is also bound to target of interest 1903. Detection aptamer 1904 carries label 1905 which can be detected to identify target captured to substrate 1901 via capture aptamer 1902. The label can be a fluorescent, radiolabel, enzyme, or other detectable label as disclosed herein. Either capture aptamer 1902 or detection aptamer 1904 can be substituted with another binding agent, e.g., an antibody. For example, the target may be captured with an antibody and detected with an aptamer, or vice versa. When the target of interest comprises a complex, the capture and detection agents (aptamer, antibody, etc) can recognize the same or different targets. For example, when the target is a microvesicle, the capture agent may recognize one microvesicle surface antigen while the detection agent recognizes another microvesicle surface antigen. Alternately, the capture and detection agents can recognize the same surface antigen.

[0413] The aptamers of the invention may be identified and/or used for various purposes in the form of DNA or RNA. Unless otherwise specified, one of skill in the art will appreciate that an aptamer may generally be synthesized in various forms of nucleic acid. The aptamers may also carry various chemical modifications and remain within the scope of the invention.

[0414] In some embodiments, an aptamer of the invention is modified to comprise at least one chemical modification. The modification may include without limitation a chemical substitution at a sugar position; a chemical substitution at a phosphate position; and a chemical substitution at a base position of the nucleic acid. In some embodiments, the modification is selected from the group consisting of: biotinylation, incorporation of a fluorescent label, incorporation of a modified nucleotide, a 2′-modified pyrimidine, 3′ capping, conjugation to an amine linker, conjugation to a high molecular weight, non-immunogenic compound, conjugation to a lipophilic compound, conjugation to a drug, conjugation to a cytotoxic moiety, and labeling with a radioisotope, or other modification as disclosed herein. The position of the modification can be varied as desired. For example, the biotinylation, fluorescent label, or cytotoxic moiety can be conjugated to the 5′ end of the aptamer. The biotinylation, fluorescent label, or cytotoxic moiety can also be conjugated to the 3′ end of the aptamer.

[0415] In some embodiments, the cytotoxic moiety is encapsulated in a nanoparticle. The nanoparticle can be selected from the group consisting of: liposomes, dendrimers, and comb polymers. In other embodiments, the cytotoxic moiety comprises a small molecule cytotoxic moiety. The small molecule cytotoxic moiety can include without limtation vinblastine hydrazide, calicheamicin, vinca alkaloid, a cryptophycin, a tubulysin, dolastatin-10, dolastatin-15, auristatin E, rhizoxin, epothilone B, epithilone D, taxoids, maytansinoids and any variants and derivatives thereof. In still other embodiments, the cytotoxic moiety comprises a protein toxin. For example, the protein toxin can be selected from the group consisting of diphtheria toxin, ricin, abrin, gelonin, and Pseudomonas exotoxin A. Non-immunogenic, high molecular weight compounds for use with the invention include polyalkylene glycols, e.g., polyethylene glycol. Appropriate radioisotopes include yttrium-90, indium-111, iodine-131, lutetium-177, copper-67, rhenium-186, rhenium-188, bismuth-212, bismuth-213, astatine-211, and actinium-225. The aptamer may be labeled with a gamma-emitting radioisotope.

[0416] In some embodiments of the invention, an active agent is conjugated to the aptamer. For example, the active agent may be a therapeutic agent or a diagnostic agent. The therapeutic agent may be selected from the group consisting of tyrosine kinase inhibitors, kinase inhibitors, biologically active agents, biological molecules, radionuclides, adriamycin, ansamycin antibiotics, asparaginase, bleomycin, busulphan, cisplatin, carboplatin, carmustine, capecotabine, chlorambucil, cytarabine, cyclophosphamide, camptothecin, dacarbazine, dactinomycin, daunorubicin, dexrazoxane, docetaxel, doxorubicin, etoposide, epothilones, floxuridine, fludarabine, fluorouracil, gemcitabine, hydroxyurea, idarubicin, ifosfamide, irinotecan, lomustine, mechlorethamine, mercaptopurine, melphalan, methotrexate, rapamycin (sirolimus), mitomycin, mitotane, mitoxantrone, nitrosurea, paclitaxel, pamidronate, pentostatin, plicamycin, procarbazine, rituximab, streptozocin, teniposide, thioguanine, thiotepa, taxanes, vinblastine, vincristine, vinorelbine, taxol, combretastatins, discodermolides, transplatinum, anti-vascular endothelial growth factor compounds (“anti-VEGFs”), anti-epidermal growth factor receptor compounds (“anti-EGFRs”), 5-fluorouracil and derivatives, radionuclides, polypeptide toxins, apoptosis inducers, therapy sensitizers, enzyme or active fragment thereof, and combinations thereof.

[0417] Oligonucleotide Pools to Characterize a Sample

[0418] The complexity and heterogeneity present in biology challenges the understanding of biological systems and disease. Diversity exists at various levels, e.g., within and between cells, tissues, individuals and disease states. See, e.g., FIG. 20A. FIG. 20B overviews various biological entities that can be assessed to characterize such samples. As shown in the Figure, as one moves from assessing DNA, to RNA, to protein, and finally to protein complexes, the amount of diversity and complexity increases dramatically. The oligonucleotide probe library method of the invention can be used characterize complex biological sources, e.g., tissue samples, cells, circulating tumor cells, microvesicles, and complexes such as protein and proteolipid complexes.

[0419] Current methods to characterize biological samples may not adequately address such complexity and diversity. As shown in FIG. 20C, such current methods often have a trade off between measuring diversity and complexity. As an example, consider high throughput sequencing technology. Next generation approaches may query many 1000s of molecular targets in a single assay. However, such approaches only probe individual DNA and/or RNA molecules, and thus miss out on the great diversity of proteins and biological complexes. On the other hand, flow cytometry can probe biological complexes, but are limited to a small number of pre-defined ligands. For example, a single assay can probe a handful of differentially labeled antibodies to pre-defined targets.

[0420] The oligonucleotide probe library of the invention address the above challenges with current biological detection technologies. The size of the starting library can be adjusted to measure as many different entities as there are library members. In this Example, the initial untrained oligonucleotide library has the potential to measure 10¹² or more biological features. A larger and/or different library can be constructed as desired. The technology is adapted to find differences between samples without assumptions about what “should be different.” For example, the probe library may distinguish based on individual proteins, protein modifications, protein complexes, lipids, nucleic acids, different folds or conformations, or whatever is there that distinguishes a sample of interest. Thus, the method provides an unbiased approach to identify differences in biological samples that can be used to identify different populations of interest.

[0421] In the context herein, the use of the oligonucleotide library probe to assess a sample may be referred to as Adaptive Dynamic Artificial Poly-ligand Targeting, or ADAPT™ (previously referred to as Topological Oligonucleotide Profiling: TOP™). Although as noted the terms aptamer and oligonucleotides are typically used interchangeable herein, some differences between “classic” individual aptamers and ADAPT probes are as follows. Individual aptamers may comprise individual oligonucleotides selected to bind to a known specific target in an antibody-like “key-in-lock” binding mode. They may be evaluated individually based on specificity and binding affinity to the intended target. However, ADAPT probes may comprise a library of oligonucleotides intended to produce multi-probe signatures. The ADAPT probes comprise numerous potential binding modalities (electrostatic, hydrophobic, Watson-Crick, multi-oligo complexes, etc.). The ADAPT probe signatures have the potential to identify heterogeneous patient subpopulations. For example, a single ADAPT probe library can be assembled to differentiate multiple disease states, as demonstrated herein. Unlike classic single aptamers, the binding targets may or may not be isolated or identified. It will be understood that screening methods that identify individual aptamers, e.g., SELEX, can also be used to enrich a naive library of oligonucleotides to identify a ADAPT probe library.

[0422] The general method of the invention is outlined in FIG. 20D. One input to the method comprises a randomized oligonucleotide library with the potential to measure 10¹² or more biological features. As outlined in the figure, the method identifies a desired number (e.g., ˜10⁵-10⁶) that are different between two input sample types. The randomized oligonucleotide library is contacted with a first and a second sample type, and oligonucleotides that bind to each sample are identified. The bound oligonucleotide populations are compared and oligonucleotides that specifically bind to one or the other biological input sample are retained for the oligonucleotide probe library, whereas oligonucleotides that bind both biological input samples are discarded. This trained oligonucleotide probe library can then be contacted with a new test sample and the identities of oligonucleotides that bind the test sample are determined. The test sample is characterized based on the profile of oligonucleotides that bound. See, e.g., FIG. 20H.

[0423] Extracellular vesicles provide an attractive vehicle to profile the biological complexity and diversity driven by many inter-related sources. There can be a great deal of heterogeneity between patient-to-patient microvesicle populations, or even in microvesicle populations from a single patient under different conditions (e.g., stress, diet, exercise, rest, disease, etc). Diversity of molecular phenotypes within microvesicle populations in various disease states, even after microvesicle isolation and sorting by vesicle biomarkers, can present challenges identifying surface binding ligands. This situation is further complicated by vesicle surface-membrane protein complexes. The oligonucleotide probe library can be used to address such challenges and allow for characterization of biological phenotypes. The approach combines the power of diverse oligonucleotide libraries and high throuput (next-generation) sequencing technologies to probe the complexity of extracellular microvesicles. See FIG. 20E.

[0424] ADAPT™ profiling may provide quantitative measurements of dynamic events in addition to detection of presence/absence of various biomarkers in a sample. For example, the binding probes may detect protein complexes or other post-translation modifications, allowing for differentiation of samples with the same proteins but in different biological configurations. Such configurations are illustrated in FIGS. 20F-G. In FIG. 20F, microvesicles with various surface markers are shown from an example microvesicle sample population: Sample Population A. The indicated Bound Probing Oligonucleotides 2001 are contacted to two surface markers 2002 and 2003 in a given special relationship. Here, probes unique to these functional complexes and spatial relationships may be retained. In contrast, in microvesicle Sample Population B shown in FIG. 20F, the two surface markers 2002 and 2003 are found in disparate spacial relationship. Here, probes 2001 are not bound due to absence of the spatial relationship of the interacting components 2002 and 2003.

[0425] An illustrative approach 2010 for using ADAPT profiling to assess a sample is shown in FIG. 20H. The probing library 2011 is mixed with sample 2012. The sample can be as described herein, e.g., a bodily fluid from a subject having or suspected of having a disease. The probes are allowed to bind the sample 2020 and the microvesicles are pelleted 2015. The supernatant 2014 comprising unbound oligonucleotides is discarded. Oligonucleotide probes bound to the pellet 2015 are eluted 2016 and sequenced 2017. The profile 2018 generated by the bound oligonucleotide probes as determined by the sequening 2017 is used to characterize the sample 2012. For example, the profile 2018 can be compared to a reference, e.g., to determine if the profile is similar or different from a reference profile indicative of a disease or healthy state, or other phenotypic characterization of interest. The comparison may indicate the presence of a disease, provide a diagnosis, prognosis or theranosis, or otherwise characterize a phenotype associated with the sample 2012. FIG. 20I illustrates another schematic for using TOP™ profiling to characterize a phenotype. A patient sample such as a bodily fluid disclosed herein is collected 2021. The sample is contacted with the TOP™ library pool 2022. Microvesicles (MVs) are isolated from the contacted sample 2023, e.g., using ultracentrifugation, filtration, polymer precipitation or other appropriate technique or combination of techniques disclosed herein. Oligonucleotides that bound the isolated microvesicles are collected and identity is determined 2024. The identity of the bound oligonucleotides can be determined by any useful technique such as sequencing, high throughput sequencing (e.g., NGS), amplification including without limitation qPCR, or hybridization such as to a planar or particle based array. The identity of the bound oligonucleotides is used to characterize the sample, e.g., as containing disease related microvesicles.

[0426] In an aspect, the invention provides a method of characterizing a sample by contacting the sample with a pool of different oligonucleotides (e.g., an aptamer pool), and determining the frequency at which various oligonucleotides in the pool bind the sample. For example, a pool of oligonucleotides is identified that preferentially bind to microvesicles from cancer patients as compared to non-cancer patients. A test sample, e.g., from a patient suspected of having the cancer, is collected and contacted with the pool of oligonucleotides. Oligonucleotides that bind the test sample are eluted from the test sample, collected and identified, and the composition of the bound oligonucleotides is compared to those known to bind cancer samples. Various sequencing, amplification and hybridization techinques can be used to identify the eluted oligonucleotides. For example, when a large pool of oligonucleotides is used, oligonucleotide identification can be performed by high throughput methods such as next generation sequencing or via hybridization. If the test sample is bound by the oligonucleotide pool in a similar manner (e.g., as determined by bioinformatics classification methods) to the microvesicles from cancer patients, then the test sample is indicative of cancer as well. Using this method, a pool of oligonucleotides that bind one or more microvesicle antigen can be used to characterize the sample without necessarily knowing the precise target of each member of the pool of oligonucleotides. Examples 15, 16, 17, 20 and 27 herein illustrate embodiments of the invention.

[0427] In an aspect, the invention provides a method for characterizing a condition for a test sample comprising: contacting a microvesicle sample with a plurality of oligonucleotide capable of binding one or more target(s) present in said microvesicle sample, identifying a set of oligonucleotides that form a complex with the sample wherein the set is predetermined to characterize a condition for the sample, thereby characterizing a condition for a sample.

[0428] In an related aspect, the invention provides a method for identifying a set of oligonucleotides associated with a test sample, comprising: (a) contacting a microvesicle sample with a plurality of oligonucleotides, isolating a set of oligonucleotides that form a complex with the microvesicle sample, (b) determining sequence and/or copy number for each of the oligonucleotides, thereby identifying a set of oligonucleotides associated with the test sample.

[0429] In still another related aspect, the invention provides a method of diagnosing a sample as cancerous or predisposed to be cancerous, comprising contacting a microvesicle sample with a plurality of oligonucleotides that are predetermined to preferentially form a complex with microvesicles from a cancer sample as compared to microvesicles from a non-cancer sample.

[0430] The oligonucleotides can be identified by sequencing, e.g., by dye termination (Sanger) sequencing or high throughput methods. High throughput methods can comprise techiques to rapidly sequence a large number of nucleic acids, including next generation techniques such as Massively parallel signature sequencing (MPSS; Polony sequencing; 454 pyrosequencing; Illumina (Solexa) sequencing; SOLiD sequencing; Ion Torrent semiconductor sequencing; DNA nanoball sequencing; Heliscope single molecule sequencing; Single molecule real time (SMRT) sequencing, or other methods such as Nanopore DNA sequencing; Tunnelling currents DNA sequencing; Sequencing by hybridization; Sequencing with mass spectrometry; Microfluidic Sanger sequencing; Microscopy-based techniques; RNAP sequencing; In vitro virus high-throughput sequencing. The oligonucleotides may also be identified by hybridization techniques. For example, a microarray having addressable locals to hybridize and thereby detect the various members of the pool can be used. Alternately, detection can be based on one or more differentially labelled oligonucleotides that hybridize with various members of the oligonucleotide pool. The detectable signal of the label can be associated with a nucleic acid molecule that hybridizes with a stretch of nucleic acids present in various oligonucleotides. The stretch can be the same or different as to one or more oligonucleotides in a library. The detectable signal can comprise fluorescence agents, including color-coded barcodes which are known, such as in U.S. Patent Application Pub. No. 20140371088, 2013017837, and 20120258870. Other detectable labels (metals, radioisotopes, etc) can be used as desired.

[0431] The plurality or pool of oligonucleotides can comprise any desired number of oligonucleotides to allow characterization of the sample. In various embodiments, the pool comprises at least 2, 3, 4, 5, 6, 7, 8, 9, 10, 11, 12, 13, 14, 15, 16, 17, 18, 19, 20, 25, 30, 40, 50, 60, 70, 80, 90, 100, 150, 200, 250, 300, 350, 400, 450, 500, 600, 700, 800, 900, 1000, 2000, 3000, 4000, 5000, 6000, 7000, 8000, 9000, or at least 10000 different oligonucleotide members.

[0432] The plurality of oligonucleotides can be pre-selected through one or more steps of positive or negative selection, wherein positive selection comprises selection of oligonucleotides against a sample having substantially similar characteristics compared to the test sample, and wherein negative selection comprises selection of oligonucleotides against a sample having substantially different characteristics compared to the test sample. Substantially similar characteristics mean that the samples used for positive selection are representative of the test sample in one or more characteristic of interest. For example, the samples used for positive selection can be from cancer patients or cell lines and the test sample can be a sample from a patient having or suspected to have a cancer. Substantially different characteristics mean that the samples used for negative selection differ from the test sample in one or more characteristic of interest. For example, the samples used for negative selection can be from individuals or cell lines that do not have cancer (e.g., “normal” or otherwise “control” samples) and the test sample can be a sample from a patient having or suspected to have a cancer. The cancer can be a breast cancer, ovarian cancer, prostate cancer, lung cancer, colorectal cancer, melanoma, brain cancer, or other cancer.

[0433] By selecting samples representative of the desired phenotypes to detect and/or distinguish, the characterizing can comprise a diagnosis, prognosis or theranosis for any number of diseases or disorders. Various diseases and disorders can be characterized using the compositions and methods of the invention, including without limitation a cancer, a premalignant condition, an inflammatory disease, an immune disease, an autoimmune disease or disorder, a cardiovascular disease or disorder, a neurological disease or disorder, an infectious disease, and/or pain. See, e.g., section herein “Phenotypes” for further details. In embodiments, the disease or disorder comprises a proliferative or neoplastic disease or disorder. For example, the disease or disorder can be a cancer. In some embodiments, the cancer comprises a breast cancer, ovarian cancer, prostate cancer, lung cancer, colorectal cancer, melanoma, or brain cancer.

[0434] FIG. 19B is a schematic 1910 showing use of an oligonucleotide pool to characterize a phenotype of a sample, such as those listed above. A pool of oligonucleotides to a target of interst is provided 1911. For example, the pool of oligonucleotides can be enriched to target one or more microvesicle. The members of the pool may bind different targets (e.g., a microvesicle surface antigen) or different epitopes of the same target present on the one or more microvesicle. The pool is contacted with a test sample to be characterized 1912. For example, the test sample may be a biological sample from an individual having or suspected of having a given disease or disorder. The mixture is washed to remove unbound oligonucleotides. The remaining oligonucleotides are eluted or otherwise disassociated from the sample and collected 1913. The collected oligonucleotides are identified, e.g., by sequencing or hybridization 1914. The presence and/or copy number of the identified is used to characterize the phenotype 1915. For example, the pool of oligonucleotides may be chosen as oligonucleotides that preferentially recognize microvesicles shed from cancer cells. The method can be employed to detect whether the sample retains oligonucleotides that bind the cancer-related microvesicles, thereby allowing the sample to be characterized as cancerous or not.

[0435] FIG. 19C is a schematic 1920 showing an implementation of the method in FIG. 19B. A pool of oligonucleotides identified as binding a microvesicle population is provided 1921. The input sample comprises a test sample comprising microvesicles 1922. For example, the test sample may be a biological sample from an individual having or suspected of having a given disease or disorder. The pool is contacted with the isolated microvesicles to be characterized 1923. The microvesicle population can be isolated before or after the contacting 1923 from the sample using various techniques as described herein, e.g., chromatography, filtration, ultrafiltration, centrifugation, ultracentrifugation, flow cytometry, affinity capture (e.g., to a planar surface, column or bead), polymer precipitation, and/or using microfluidics. The mixture is washed to remove unbound oligonucleotides and the remaining oligonucleotides are eluted or otherwise disassociated from the sample and collected 1924. The collected oligonucleotides are identified 1925 and the presence and/or copy number of the retained oligonucleotides is used to characterize the phenotype 1926 as above.

[0436] As noted, in embodiment of FIG. 19C, the pool of oligonucleotides 1920 is directly contacted with a biological sample that comprises or is expected to comprise microvesicles. Microvesicles are thereafter isolated from the sample and the mixture is washed to remove unbound oligonucleotides and the remaining oligonucleotides are disassociated and collected 1924. The following steps are performed as above. As an example of this alternate configuration, a biological sample, e.g., a blood, serum or plasma sample, is directly contacted with the pool of oligonucleotides. Microvesicles are then isolated by various techniques disclosed herein, including without limitation ultracentrifugation, ultrafiltration, flow cytometry, affinity isolation, polymer precipitation, chromatography, various combinations thereof, or the like. Remaining oligonucleotides are then identified, e.g., by sequencing, hybridization or amplification.

[0437] In a related aspect, the invention provides a composition of matter comprising a plurality of oligonucleotides that can be used to carry out the methods comprising use of an oligonucleotide pool to characterize a phenotype. The plurality of oligonucleotides can comprise any of those described herein.

[0438] In a related aspect, the invention provides a method of performing high-throughput sequencing comprising: performing at least one (i) negative selection or (ii) one positive selection of a plurality of oligonucleotides with a microvesicle sample; obtaining a set of oliognucleotides to provide a negative binder subset or positive binder subset of the plurality of oligonucleotides, wherein the negative binder subset of the plurality of oligonucleotides does not bind the microvesicle sample and wherein the positive binder subset of the plurality of oligonucleotides does bind the microvesicle sample; contacting the negative binder subset or positive binder subset with a test sample; eluting oligonucleotides that bound to the test sample to provide a plurality of eluate oligonucleotides; and performing high-throughput sequencing of the plurality of eluate oligonucleotides to identify sequence and/or copy number of the members of the plurality of eluate oligonucleotides. Negative and positive selection of the plurality of oligonucleotides using microvesicle sample can be performed as disclosed herein. The oligonucleotide profile revealed by the sequence and/or copy number of the members of the plurality of eluate oligonucleotides can be used to characterize a phenotype of the test sample as described herein.

[0439] In a similar aspect, the invention provides a method for identifying oligonucleotides specific for a test sample. The method comprises: (a) enriching a plurality of oligonucleotides for a sample to provide a set of oligonucleotides predetermined to form a complex with a target sample; (b) contacting the plurality in (a) with a test sample to allow formation of complexes of oligonucleotides with test sample; (c) recovering oligonucleotides that formed complexes in (b) to provide a recovered subset of oligonucleotides; and (d) profiling the recovered subset of oligonucleotides by high-throughput sequencing or hybridization, thereby identifying oligonucleotides specific for a test sample. The test sample may comprise a plurality of microvesicles. The oligonucleotides may comprise RNA, DNA or both. In some embodiment, the method further comprises performing informatics analysis to identify a subset of oligonucleotides comprising sequence identity of at least 50%, 55%, 60%, 65%, 70%, 75%, 80%, 85%, 90%, 91%, 92%, 93%, 94%, 95%, 96%, 97%, 98%, or at least 99% to the oligonucleotides predetermined to form a complex with the target sample.

[0440] One of skill will appreciate that the method can be used to identify any appropriate target, including those not associated with a microvesicle. The target can be any useful target, including without limitation a cell, an organelle, a protein complex, a lipoprotein, a carbohydrate, a microvesicle, a virus, a membrane fragment, a small molecule, a heavy metal, a toxin, a drug, a nucleic acid (including without limitation microRNA (miR) and messenger RNA (mRNA)), a protein-nucleic acid complex, and various combinations, fragments and/or complexes of any of these. The target can, e.g., comprise a mixture of microvesicles and non-microvesicle entities.

[0441] In an aspect, the invention also provides a method comprising contacting an oligonucleotide or plurality of oligonucleotides with a sample and detecting the presence or level of binding of the oligonucleotide or plurality of oligonucleotides to a target in the sample, wherein the oligonucleotide or plurality of oligonucleotides can be those provided by the invention above. The sample may comprise a biological sample, an organic sample, an inorganic sample, a tissue, a cell culture, a bodily fluid, blood, serum, a cell, a microvesicle, a protein complex, a lipid complex, a carbohydrate, or any combination, fraction or variation thereof. The target may comprise a cell, an organelle, a protein complex, a lipoprotein, a carbohydrate, a microvesicle, a membrane fragment, a small molecule, a heavy metal, a toxin, or a drug.

[0442] In a related aspect, the invention provides a method comprising: a) contacting a biological sample comprising microvesicles with an oligonucleotide probe library, wherein optionally the oligonucleotide probe library comprises an oligonucleotide or plurality of oligonucleotides those provided by the invention above; b) identifying oligonucleotides bound to at least a portion of the microvesicles; and c) characterizing the sample based on a profile of the identified oligonucleotides.

[0443] In another aspect, the invention provides a method comprising: a) contacting a sample with an oligonucleotide probe library comprising at least 10⁶, 10⁷, 10⁸, 10⁹, 10¹⁰, 10¹¹, 10¹², 10¹³, 10¹⁴, 10¹⁵, 10¹⁶, 10¹⁷, or at least 10¹⁸ different oligonucleotide sequences oligonucleotides to form a mixture in solution, wherein the oligonucleotides are capable of binding a plurality of entities in the sample to form complexes, wherein optionally the oligonucleotide probe library comprises an oligonucleotide or plurality of oligonucleotides as provided by the invention above; b) partitioning the complexes formed in step (a) from the mixture; and c) detecting oligonucleotides present in the complexes partitioned in step (b) to identify an oligonucleotide profile for the sample. In an embodiment, the detecting step comprises performing sequencing of all or some of the oligonucleotides in the complexes, amplification of all or some of the oligonucleotides in the complexes, and/or hybridization of all or some of the oligonucleotides in the complexes to an array. The array can be any useful array, such as a planar or particle-based array.

[0444] In still another aspect, the invention provides a method for generating an enriched oligonucleotide probe library comprising: a) contacting a first oligonucleotide library with a biological test sample and a biological control sample, wherein complexes are formed between biological entities present in the biological samples and a plurality of oligonucleotides present in the first oligonucleotide library; b) partitioning the complexes formed in step (a) and isolating the oligonucleotides in the complexes to produce a subset of oligonucleotides for each of the biological test sample and biological control sample; c) contacting the subsets of oligonucleotides in (b) with the biological test sample and biological control sample wherein complexes are formed between biological entities present in the biological samples and a second plurality of oligonucleotides present in the subsets of oligonucleotides to generate a second subset group of oligonucleotides; and d) optionally repeating steps b)-c), one, two, three or more times to produce a respective third, fourth, fifth or more subset group of oligonucleotides, thereby producing the enriched oligonucleotide probe library. In a related aspect, the invention provides a plurality of oligonucleotides comprising at least 2, 3, 4, 5, 6, 7, 8, 9, 10, 11, 12, 13, 14, 15, 16, 17, 18, 19, 20, 25, 30, 40, 45, 50, 55, 60, 65, 70, 75, 80, 85, 90, 95, 100, 125, 150, 175, 200, 300, 400, 500, 600, 700, 800, 900, 1000, 2000, 3000, 4000, 5000, 6000, 7000, 8000, 9000, 10000, 20000, 30000, 40000, 50000, 60000, 70000, 80000, 90000, 100000, 200000, 300000, 400000, or 500000 different oligonucleotide sequences, wherein the plurality results from the method in this paragraph, wherein the library is capable of distinguishing a first phenotype from a second phenotype. In some embodiments, the first phenotype comprises a disease or disorder and the second phenotype comprises a healthy state; or wherein the first phenotype comprises a disease or disorder and the second phenotype comprises a different disease or disorder; or wherein the first phenotype comprises a stage or progression of a disease or disorder and the second phenotype comprises a different stage or progression of the same disease or disorder; or wherein the first phenotype comprises a positive response to a therapy and the second phenotype comprises a negative response to the same therapy.

[0445] In yet another aspect, the invention provides a method of characterizing a disease or disorder, comprising: a) contacting a biological test sample with the oligonucleotide or plurality of oligonucleotides provided by the invention; b) detecting a presence or level of complexes formed in step (a) between the oligonucleotide or plurality of oligonucleotides provided by the invention and a target in the biological test sample; and c) comparing the presence or level detected in step (b) to a reference level from a biological control sample, thereby characterizing the disease or disorder. The step of detecting may comprise performing sequencing of all or some of the oligonucleotides in the complexes, amplification of all or some of the oligonucleotides in the complexes, and/or hybridization of all or some of the oligonucleotides in the complexes to an array. The sequencing may be high-throughput or next generation sequencing.

[0446] In the methods of the invention, the biological test sample and biological control sample may each comprise a tissue sample, a cell culture, or a biological fluid. In some embodiments, the biological fluid comprises a bodily fluid. Useful bodily fluids within the method of the invention comprise peripheral blood, sera, plasma, ascites, urine, cerebrospinal fluid (CSF), sputum, saliva, bone marrow, synovial fluid, aqueous humor, amniotic fluid, cerumen, breast milk, broncheoalveolar lavage fluid, semen, prostatic fluid, cowper's fluid or pre-ejaculatory fluid, female ejaculate, sweat, fecal matter, hair, tears, cyst fluid, pleural and peritoneal fluid, pericardial fluid, lymph, chyme, chyle, bile, interstitial fluid, menses, pus, sebum, vomit, vaginal secretions, mucosal secretion, stool water, pancreatic juice, lavage fluids from sinus cavities, bronchopulmonary aspirates, blastocyl cavity fluid, or umbilical cord blood. In some preferred embodiments, the bodily fluid comprises blood, serum or plasma. The biological fluid may comprise microvesicles. In such case, the complexes may be formed between the oligonucleotide or plurality of oligonucleotides and at least one of the microvesicles.

[0447] The biological test sample and biological control sample may further comprise isolated microvesicles, wherein optionally the microvesicles are isolated using at least one of chromatography, filtration, ultrafiltration, centrifugation, ultracentrifugation, flow cytometry, affinity capture (e.g., to a planar surface, column or bead), polymer precipitation, and using microfluidics. The vesicles can also be isolated after contact with the oligonucleotide or plurality of oligonucleotides.

[0448] In various embodiments of the methods of the invention, the oligonucleotide or plurality of oligonucleotides binds a polypeptide or fragment thereof. The polypeptide or fragment thereof can be soluble or membrane bound, wherein optionally the membrane comprises a microvesicle membrane. The membrane could also be from a cell or a fragment of a cell of vesicle. In some embodiments, the polypeptide or fragment thereof comprises a biomarker in Table 3, Table 4 or any one of Tables 22-34. For example, the polypeptide or fragment thereof could be a general vesicle marker such as in Table 3 or a tissue-related or disease-related marker such as in Table 4, or a vesicle associated biomarker provided in any one of Tables 22-34. The oligonucleotide or plurality of oligonucleotides may bind a microvesicle surface antigen in the biological sample. For example, the oligonucleotide or plurality of oligonucleotides can be enriched from a naïve library against microvesicles.

[0449] As noted above, the microvesicles may be isolated in whole or in part using polymer precipitation. In an embodiment, the polymer comprises polyethylene glycol (PEG). Any appropriate form of PEG may be used. For example, the PEG may be PEG 8000. The PEG may be used at any appropriate concentration. For example, the PEG can be used at a concentration of 1%, 2%, 3%, 4%, 5%, 6%, 7%, 8%, 9%, 10%, 11%, 12%, 13%, 14% or 15% to isolate the microvesicles. In some embodiments, the PEG is used at a concentration of 6%.

[0450] The disease or disorder detected by the oligonucleotide, plurality of oligonucleotides, or methods provided here may comprise any appropriate disease or disorder of interest, including without limitation Breast Cancer, Alzheimer's disease, bronchial asthma, Transitional cell carcinoma of the bladder, Giant cellular osteoblastoclastoma, Brain Tumor, Colorectal adenocarcinoma, Chronic obstructive pulmonary disease (COPD), Squamous cell carcinoma of the cervix, acute myocardial infarction (AMI)/acute heart failure, Chron's Disease, diabetes mellitus type II, Esophageal carcinoma, Squamous cell carcinoma of the larynx, Acute and chronic leukemia of the bone marrow, Lung carcinoma, Malignant lymphoma, Multiple Sclerosis, Ovarian carcinoma, Parkinson disease, Prostate adenocarcinoma, psoriasis, Rheumatoid Arthritis, Renal cell carcinoma, Squamous cell carcinoma of skin, Adenocarcinoma of the stomach, carcinoma of the thyroid gland, Testicular cancer, ulcerative colitis, or Uterine adenocarcinoma.

[0451] In some embodiments, the disease or disorder comprises a cancer, a premalignant condition, an inflammatory disease, an immune disease, an autoimmune disease or disorder, a cardiovascular disease or disorder, neurological disease or disorder, infectious disease or pain. The cancer can include without limitation one of acute lymphoblastic leukemia; acute myeloid leukemia; adrenocortical carcinoma; AIDS-related cancers; AIDS-related lymphoma; anal cancer; appendix cancer; astrocytomas; atypical teratoid/rhabdoid tumor; basal cell carcinoma; bladder cancer; brain stem glioma; brain tumor (including brain stem glioma, central nervous system atypical teratoid/rhabdoid tumor, central nervous system embryonal tumors, astrocytomas, craniopharyngioma, ependymoblastoma, ependymoma, medulloblastoma, medulloepithelioma, pineal parenchymal tumors of intermediate differentiation, supratentorial primitive neuroectodermal tumors and pineoblastoma); breast cancer; bronchial tumors; Burkitt lymphoma; cancer of unknown primary site; carcinoid tumor; carcinoma of unknown primary site; central nervous system atypical teratoid/rhabdoid tumor; central nervous system embryonal tumors; cervical cancer; childhood cancers; chordoma; chronic lymphocytic leukemia; chronic myelogenous leukemia; chronic myeloproliferative disorders; colon cancer; colorectal cancer; craniopharyngioma; cutaneous T-cell lymphoma; endocrine pancreas islet cell tumors; endometrial cancer; ependymoblastoma; ependymoma; esophageal cancer; esthesioneuroblastoma; Ewing sarcoma; extracranial germ cell tumor; extragonadal germ cell tumor; extrahepatic bile duct cancer; gallbladder cancer; gastric (stomach) cancer; gastrointestinal carcinoid tumor; gastrointestinal stromal cell tumor; gastrointestinal stromal tumor (GIST); gestational trophoblastic tumor; glioma; hairy cell leukemia; head and neck cancer; heart cancer; Hodgkin lymphoma; hypopharyngeal cancer; intraocular melanoma; islet cell tumors; Kaposi sarcoma; kidney cancer; Langerhans cell histiocytosis; laryngeal cancer; lip cancer; liver cancer; lung cancer; malignant fibrous histiocytoma bone cancer; medulloblastoma; medulloepithelioma; melanoma; Merkel cell carcinoma; Merkel cell skin carcinoma; mesothelioma; metastatic squamous neck cancer with occult primary; mouth cancer; multiple endocrine neoplasia syndromes; multiple myeloma; multiple myeloma/plasma cell neoplasm; mycosis fungoides; myelodysplastic syndromes; myeloproliferative neoplasms; nasal cavity cancer; nasopharyngeal cancer; neuroblastoma; Non-Hodgkin lymphoma; nonmelanoma skin cancer; non-small cell lung cancer; oral cancer; oral cavity cancer; oropharyngeal cancer; osteosarcoma; other brain and spinal cord tumors; ovarian cancer; ovarian epithelial cancer; ovarian germ cell tumor; ovarian low malignant potential tumor; pancreatic cancer; papillomatosis; paranasal sinus cancer; parathyroid cancer; pelvic cancer; penile cancer; pharyngeal cancer; pineal parenchymal tumors of intermediate differentiation; pineoblastoma; pituitary tumor; plasma cell neoplasm/multiple myeloma; pleuropulmonary blastoma; primary central nervous system (CNS) lymphoma; primary hepatocellular liver cancer; prostate cancer; rectal cancer; renal cancer; renal cell (kidney) cancer; renal cell cancer; respiratory tract cancer; retinoblastoma; rhabdomyosarcoma; salivary gland cancer; Sézary syndrome; small cell lung cancer; small intestine cancer; soft tissue sarcoma; squamous cell carcinoma; squamous neck cancer; stomach (gastric) cancer; supratentorial primitive neuroectodermal tumors; T-cell lymphoma; testicular cancer; throat cancer; thymic carcinoma; thymoma; thyroid cancer; transitional cell cancer; transitional cell cancer of the renal pelvis and ureter; trophoblastic tumor; ureter cancer; urethral cancer; uterine cancer; uterine sarcoma; vaginal cancer; vulvar cancer; Waldenström macroglobulinemia; or Wilm's tumor. The premalignant condition can include without limitation Barrett's Esophagus. The autoimmune disease can include without limitation one of inflammatory bowel disease (IBD), Crohn's disease (CD), ulcerative colitis (UC), pelvic inflammation, vasculitis, psoriasis, diabetes, autoimmune hepatitis, multiple sclerosis, myasthenia gravis, Type I diabetes, rheumatoid arthritis, psoriasis, systemic lupus erythematosis (SLE), Hashimoto's Thyroiditis, Grave's disease, Ankylosing Spondylitis Sjogrens Disease, CREST syndrome, Scleroderma, Rheumatic Disease, organ rejection, Primary Sclerosing Cholangitis, or sepsis. The cardiovascular disease can include without limitation one of atherosclerosis, congestive heart failure, vulnerable plaque, stroke, ischemia, high blood pressure, stenosis, vessel occlusion or a thrombotic event. The neurological disease can include without limitation one of Multiple Sclerosis (MS), Parkinson's Disease (PD), Alzheimer's Disease (AD), schizophrenia, bipolar disorder, depression, autism, Prion Disease, Pick's disease, dementia, Huntington disease (HD), Down's syndrome, cerebrovascular disease, Rasmussen's encephalitis, viral meningitis, neurospsychiatric systemic lupus erythematosus (NPSLE), amyotrophic lateral sclerosis, Creutzfeldt-Jacob disease, Gerstmann-Straussler-Scheinker disease, transmissible spongiform encephalopathy, ischemic reperfusion damage (e.g. stroke), brain trauma, microbial infection, or chronic fatigue syndrome. The pain can include without limitation one of fibromyalgia, chronic neuropathic pain, or peripheral neuropathic pain. The infectious disease can include without limitation one of a bacterial infection, viral infection, yeast infection, Whipple's Disease, Prion Disease, cirrhosis, methicillin-resistant staphylococcus aureus, HIV, HCV, hepatitis, syphilis, meningitis, malaria, tuberculosis, or influenza. One of skill will appreciate that the oligonucleotide or plurality of oligonucleotides or methods of the invention can be used to assess any number of these or other related diseases and disorders.

[0452] In some embodiments of the invention, the oligonucleotide or plurality of oligonucleotides and methods of use thereof are useful for characterizing certain diseases or disease states. As desired, a pool of oligonucleotides useful for characterizing various diseases is assembled to create a master pool that can be used to probe useful for characterizing the various diseases. One of skill will also appreciate that pools of oligonucleotides useful for characterizing specific diseases or disorders can be created as well. The sequences provided herein can also be modified as desired so long as the functional aspects are still maintained (e.g., binding to various targets or ability to characterize a phenotype). For example, the oligonucleotides may comprise DNA or RNA, incorporate various non-natural nucleotides, incorporate other chemical modifications, or comprise various deletions or insertions. Such modifications may facilitate synthesis, stability, delivery, labeling, etc, or may have little to no effect in practice. In some cases, some nucleotides in an oligonucleotide may be substituted while maintaining functional aspects of the oligonucleotide. Similarly, 5′ and 3′ flanking regions may be substituted. In still other cases, only a portion of an oligonucleotide may be determined to direct its functionality such that other portions can be deleted or substituted. Numerous techniques to synthesize and modify nucleotides and polynucleotides are disclosed herein or are known in the art.

[0453] In an aspect, the invention provides a kit comprising a reagent for carrying out the methods of the invention provided herein. In a similar aspect, the invention contemplates use of a reagent for carrying out the methods of the invention provided herein. In embodiments, the reagent comprises an oligonucleotide or plurality of oligonucleotides. The oligonucleotide or plurality of oligonucleotides can be those provided herein. The reagent may comprise various other useful components including without limitation microRNA (miR) and messenger RNA (mRNA)), a protein-nucleic acid complex, and various combinations, fragments and/or complexes of any of these. Theone or more of: a) a reagent configured to isolate a microvesicle, optionally wherein the at least one reagent configured to isolate a microvesicle comprises a binding agent to a microvesicle antigen, a column, a substrate, a filtration unit, a polymer, polyethylene glycol, PEG4000, PEG8000, a particle or a bead; b) at least one oligonucleotide configured to act as a primer or probe in order to amplify, sequence, hybridize or detect the oligonucleotide or plurality of oligonucleotides; and c) a reagent configured to remove one or more abundant protein from a sample, wherein optionally the one or more abundant protein comprises at least one of albumin, immunoglobulin, fibrinogen and fibrin.

[0454] Detecting Watson-Crick Base Pairing with an Oligonucleotide Probe

[0455] The oligonucleotide probes provided by the invention can bind via non-Watson Crick base pairing. However, in some cases, the oligonucleotide probes provided by the invention can bind via Watson Crick base pairing. The oligonucleotide probe libraries of the invention, e.g., as described above, can query both types of binding events simultaneously. For example, some oligonucleotide probes may bind the microvesicle protein antigens in the classical aptamer sense, whereas other oligonucleotide probes may bind microvesicles via nucleic acids associated with the microvesicles, e.g., nucleic acid (including without limitation microRNA and mRNA) on the surface of the microvesicles or as payload. Such surface bound nucleic acids can be associated with proteins. For example, they may comprise Argonaute-microRNA complexes. The argonaute protein can be Ago 1, Ago2, Ago3 and/or Ago4.

[0456] In addition to the oligonucleotide probe library approach described herein which relies on determining a sequence of the oligonucleotides (e.g., via sequencing, hybridization or amplification), assays can also be designed to detect Watson Crick base pairing. In some embodiments, these approaches rely on Ago2-mediated cleavage wherein an Ago2-microRNA complex can be used to detected using oligonucleotide probes. An outline of the method is shown in FIG. 13 using Ago2 as an example. In an optional first step 1301, Ago2/miR complexes are captured and isolated. For example, an antibody or aptamer to Ago2 can be used to capture the complexes. The complexes can be immunoprecipitated or captured to a substrate, such as a planar array, column or microbead. The Ago2/miR enzymatic reactions are performed in a single or multiplex fashion 1302. In this step, the captured Ago2/miR complexes can be contacted with one or more anti-miR probe. In an alternate configuration, the input biological sample is directly assayed in step 1302. For example, a sample source with many constituents such as blood may benefit from capture and/or isolation of the complexes 1301 prior to detecting enzymatic activity 1302, whereas other sample sources may have less benefit of capture and/or isolation 1301 and can be directly contacted with the one or more anti-miR probe. The anti-miR probe can be configured such that cleavage of the probe can be detected 1303. The Ago2 enzymatic cleavage activity can be quantified as desired.

[0457] Two approaches to detect the Ago2/miR complexes are described in Example 21 (“cariMir” approach) or Example 22 (molecular beacon approach). These approaches can use oligonucleotide probes to detect Ago2-microRNA complexes, which may or may not be associated with microvesicles. The detection can be used to characterize a phenotype as described herein. Such detection can be used along side the sequencing identification methods described herein (e.g., via sequencing, hybridization or amplification). Oligonucleotide probes can be designed for the cleavage assays against any known microRNA. See, e.g., Example 25 herein. The probes can contain a region that is complementary to the microRNA of interest. Binding of the probe to the Ago2-microRNA complex may lead to cleavage of the probe, which cleavage events can be detected, thereby detected the presence of the the Ago2-microRNA complex. Control probes can be designed that contain a mismatch at the Ago2 cleavage site in order to prevent Ago2-mediated cleavage. The assays can be designed for alternate protein-nucleic acid complexes as desired.

[0458] In an embodiment, the invention provides an oligonucleotide probe comprising an anti-miR complementary sequence according to any one of SEQ ID NO. 2765-5352. The Sequence Listing notes the appropriate microRNA for each probe. The invention also provides an anti-miR mismatch sequence according to any one of SEQ ID NO. 5353-7940. The Sequence Listing also notes the appropriate microRNA for each control probe.

[0459] The oligonucleotide probes can be surrounded by at least one flanking sequence. The flanking sequence can be chosen to provide various functionalities to a probe construct. For example, the flanking sequence may serve as a primer for amplification or sequencing, or for probe identification, capture, labeling and other detection schemes. In some embodiments, the oligonucleotide probe comprises the sequence 5′-CTAGCATGACTGCAGTACGT [ spacer] [anti-miR] CTGTCTCTTATACACATCTGACGCTGCCGACGA-3′, wherein the spacer comprises at least one nucleotide and wherein the [anti-miR] sequence is complementary to a microRNA. If desired, the spacer can be varied in length according to the length of the anti-miR sequence such that all members of a mixture of oligonucleotide probes are of the same length. Such schemes are described in Table 20 or Table 21 and accompanying text. The spacer can also be included 3′ of the anti-miR, or spacers can be included around both sides of the anti-miR within the contruct. The anti-miR section can be designed to be complementary to any known microRNA of interest. For example, the anti-miR section can be complementary to a human microRNA, e.g., a human microRNA as shown herein in any one of SEQ ID NO. 177-2764. In some embodiments, the anti-miR sequence comprises an anti-miR complementary sequence according to any one of SEQ ID NO. 2765-5352. Control probes can be constructed that are not cleaved by the protein. Such control probes may comprise an anti-miR mismatch sequence selected from any one of SEQ ID NO. 5353-7940.

[0460] In other embodiments, the oligonucleotide probe comprises the sequence 5′ GATCTCCTGTCATCTCACCT [anti-miR] TGTAGAACCATGTCGTCAGTGT 3′. The anti-miR section can be designed to be complementary to any known microRNA of interest. For example, the anti-miR section can be complementary to a human microRNA, e.g., a human microRNA as shown herein in any one of SEQ ID NO. 177-2764. In some embodiments, the anti-miR sequence comprises an anti-miR complementary sequence according to any one of SEQ ID NO. 2765-5352. Control probes can be constructed that are not cleaved by the protein. Such control probes may comprise an anti-miR mismatch sequence selected from any one of SEQ ID NO. 5353-7940.

[0461] The invention further provides an oligonucleotide that is at least 50, 55, 60, 65, 70, 75, 80, 85, 90, 95, 96, 97, 98, 99 or 100 percent homologous to an oligonucleotide sequence described above. In some cases, mismatches in the anti-miR portions can allow promiscuity in the recognition of the probes by a protein-nucleic acid complex, such as an Ago2-microRNA complex. Thus, the anti-miR may contain at least 1, 2, 3, 4, 5, 6, 7, 8, 9, 10, 11, 12, 13, 14, 15, 16, 17, 18, 19, 20 or more mismatches compared to the complementary microRNA sequence as desired, e.g., up to the point that base pairing and/or cleavage no longer occur. For partially complementary microRNAs to recognise their target nucleic acids, a section of the microRNA referred to as the “seed region,” e.g., nucleotides 2-7 of the miRNA may need to be perfectly complementary. However, pairing of the seed region alone may not offer enough pairing to induce cleavage of the microRNA targets such as mRNAs. See, e.g., Ellwanger D C, et al (2011). The sufficient minimal set of miRNA seed types. Bioinformatics 27:1346-50, which reference is incorporated by reference herein in its entirety.

[0462] The invention also provides a plurality of oligonucleotides comprising at least 1, 2, 3, 4, 5, 6, 7, 8, 9, 10, 11, 12, 13, 14, 15, 16, 17, 18, 19, 20, 25, 30, 40, 45, 50, 55, 60, 65, 70, 75, 80, 85, 90, 95, 100, 125, 150, 175, 200, 300, 400, 500, 600, 700, 800, 900, 1000, 2000, 3000, 4000, 5000, 6000, 7000, 8000, 9000, or at least 10000 different oligonucleotide sequences as described above. For example, such mixtures can be designed to query the presence of all known microRNA, or of a subset directed to query certain microRNA complexes of interest. The plurality of oligonucleotides may comprise a nucleic acid sequence or a portion thereof that is at least 50, 55, 60, 65, 70, 75, 80, 85, 90, 95, 96, 97, 98, 99 or 100 percent homologous to the specific oligonucleotides directed above.

[0463] The oligonucleotide or plurality of oligonucleotides may comprise either DNA and/or RNA. Ago2 is able to cleave either DNA or RNA bound to the loaded microRNA. In some cases, DNA may be preferred. For example, DNA may be inherently more stable in biological samples which may comprise various RNAses. The oligonucleotide or plurality of oligonucleotides may also comprise various modifications as desired. For example, oligonucleotide or plurality of oligonucleotides may have at least one functional modification selected from the group consisting of biotinylation, a non-naturally occurring nucleotide, a deletion, an insertion, an addition, and a chemical modification. Other nucleic acid modification disclosed herein or known in the art may be used as desired.

[0464] In a related aspect, the invention provides a composition comprising an oligonucleotide or plurality of oligonucleotides as above. The composition can include various components, e.g., the composition may comprise a buffer and/or a stabilizing agent.

[0465] In an aspect, the invention provides a method of detecting at least one microRNA-protein complex in a sample comprising: a) contacting the sample with at least one oligonucleotide capable of binding a microRNA in a complex between the microRNA and a protein molecule; and b) identifying cleavage of the at least one oligonucleotide in the contacted sample, thereby detecting the at least one microRNA-protein complex in the sample. The at least one oligonucleotide can be an oligonucleotide or plurality of oligonucleotides as described above. The at least one oligonucleotide may comprises a 5′ flanking region, a core region configured 5′ of the flanking region, and a 3′ flanking region configured 5′ of the core region, wherein the at least one oligonucleotide is configured to be cleaved within the core region by a protein component of the at least one microRNA-protein complex if the oligonucleotide is fully or partially complementary to the microRNA component of the at least one microRNA-protein complex. See, e.g., FIG. 14A.

[0466] The microRNA can be from any source of interest, including an animal or plant source. In an embodiment, the microRNA a human microRNA. For example, human microRNA can be as shown herein in any one of SEQ ID NO. 177-2764 or as described in the miRbase database (available at www.mirbase.org). In some embodiments, the microRNA comprises at least one of let-7a, miR-16, miR-21 or miR-92a. The protein within the at least one microRNA-protein complex can be a nucleic acid binding protein. In some embodiments, the protein comprises an Argonaute protein, Ago2, Ago1, Ago3 or Ago 4. The method of the invention may further comprise addition of a chelating agent prior to the contacting step and addition of magnesium after the contacting step. Addition of the chelating agent, e.g., EDTA, may inhibit cleavage events. Later addition of magnesium may then allow cleavage to proceed. Thus, this additional step can be used to control cleavage events as desired.

[0467] Cleavage of the at least one oligonucleotide can be identified by detecting cleaved and/or non-cleaved products of the at least one oligonucleotide. Any useful method of detecting such products can be used. For example, the cleaved and/or non-cleaved products can be detected by sequencing, amplification, hybridization, and/or via a detectable label. Detection by hybridization may comprise contacting the cleaved and/or non-cleaved products with at least one labeled probe that is configured to hybridize with at least one cleaved and/or non-cleaved product. The label can be any appropriate detectable label, e.g., as described elsewhere herein or known in the art. In some embodiments, the label comprises a fluorescent label. Useful systems include the nCounter nucleic acid detection system from NanoString Technologies, Inc. (Seattle, Wash.). The detection by hybridization can also include detecting hybridization to a planar array (e.g., a microarray) or particle array (e.g., a microbead array).

[0468] The cleaved and/or non-cleaved products can also be detected by size. Size can be determined using any useful technique. For example, the size can be determined via gel electrophoresis or chromatography.

[0469] The cleaved and/or non-cleaved products can be detected by sequencing. Sequencing can be performed using any useful technique. For example, the sequencing may be next generation sequencing, dye termination sequencing and/or pyrosequencing.

[0470] The cleaved and/or non-cleaved products can be detected using a label. Any useful labeling system can be used. One such system comprises a molecular beacon system, e.g., as shown in FIG. 15A. In such a system, the 5′ end of the at least one oligonucleotide carries a fluorescent label and the 3′ end of the oligonucleotide carries a fluorescent quencher. Alternately, the 3′ end of the at least one oligonucleotide carries a fluorescent label and the 5′ end of the oligonucleotide carries a fluorescent quencher. As shown in FIG. 15A, the fluorescent label is detectable upon cleavage of the at least one oligonucleotide by the protein component of the at least one microRNA-protein complex. A molecular beacon can be designed using structure prediction. See, e.g., Example 23.

[0471] In some embodiments of the method, the microRNA-protein complex is associated with a microvesicle in the sample. For example, the microRNA-protein complex may be payload within a microvesicle. In that case, the microvesicle can be lysed prior to the contacting step. Alternately, the microRNA-protein complex may be associated with the outer surface of the microvesicle. For example, the protein may be a surface antigen.

[0472] The method of the invention can be used to characterize a phenotype. The phenotype may be any detectable phenotype, e.g., a condition, disease or disorder. In such cases, the characterizing can include without limitation providing diagnostic, prognostic and/or theranostic information for the disease or disorder. In the methods of the invention, the characterizing may comprise comparing a presence or level of the detected at least one microRNA-protein complex to a reference level. The reference can be any useful level. In some embodiments, the reference comprises a presence or level of the at least one microRNA-protein complex in a sample from an individual without the disease or disorder.

[0473] The sample assessed according to the method can be a biological sample. For example, the biological sample may be a bodily fluid, tissue sample or cell culture. In some embodiments, the bodily fluid comprises peripheral blood, sera, plasma, ascites, urine, cerebrospinal fluid (CSF), sputum, saliva, bone marrow, synovial fluid, aqueous humor, amniotic fluid, cerumen, breast milk, broncheoalveolar lavage fluid, semen, prostatic fluid, cowper's fluid or pre-ejaculatory fluid, female ejaculate, sweat, fecal matter, hair oil, tears, cyst fluid, pleural and peritoneal fluid, pericardial fluid, lymph, chyme, chyle, bile, interstitial fluid, menses, pus, sebum, vomit, vaginal secretions, mucosal secretion, stool water, pancreatic juice, lavage fluids from sinus cavities, bronchopulmonary aspirates, blastocyl cavity fluid, or umbilical cord blood. Plasma and serum may be preferred for some applications.

[0474] The sample can be from a subject suspected of having or being predisposed to a disease or disorder. The disease or disorder can be any disease or disorder that can be assessed by the subject method. For example, the disease or disorder may be a cancer, a premalignant condition, an inflammatory disease, an immune disease, an autoimmune disease or disorder, a pregnancy related disorder, a cardiovascular disease or disorder, a neurological disease or disorder, an infectious disease or pain. In an embodiment, the cancer comprises an acute lymphoblastic leukemia; acute myeloid leukemia; adrenocortical carcinoma; AIDS-related cancers; AIDS-related lymphoma; anal cancer; appendix cancer; astrocytomas; atypical teratoid/rhabdoid tumor; basal cell carcinoma; bladder cancer; brain stem glioma; brain tumor (including brain stem glioma, central nervous system atypical teratoid/rhabdoid tumor, central nervous system embryonal tumors, astrocytomas, craniopharyngioma, ependymoblastoma, ependymoma, medulloblastoma, medulloepithelioma, pineal parenchymal tumors of intermediate differentiation, supratentorial primitive neuroectodermal tumors and pineoblastoma); breast cancer; bronchial tumors; Burkitt lymphoma; cancer of unknown primary site; carcinoid tumor; carcinoma of unknown primary site; central nervous system atypical teratoid/rhabdoid tumor; central nervous system embryonal tumors; cervical cancer; childhood cancers; chordoma; chronic lymphocytic leukemia; chronic myelogenous leukemia; chronic myeloproliferative disorders; colon cancer; colorectal cancer; craniopharyngioma; cutaneous T-cell lymphoma; endocrine pancreas islet cell tumors; endometrial cancer; ependymoblastoma; ependymoma; esophageal cancer; esthesioneuroblastoma; Ewing sarcoma; extracranial germ cell tumor; extragonadal germ cell tumor; extrahepatic bile duct cancer; gallbladder cancer; gastric (stomach) cancer; gastrointestinal carcinoid tumor; gastrointestinal stromal cell tumor; gastrointestinal stromal tumor (GIST); gestational trophoblastic tumor; glioma; hairy cell leukemia; head and neck cancer; heart cancer; Hodgkin lymphoma; hypopharyngeal cancer; intraocular melanoma; islet cell tumors; Kaposi sarcoma; kidney cancer; Langerhans cell histiocytosis; laryngeal cancer; lip cancer; liver cancer; lung cancer; malignant fibrous histiocytoma bone cancer; medulloblastoma; medulloepithelioma; melanoma; Merkel cell carcinoma; Merkel cell skin carcinoma; mesothelioma; metastatic squamous neck cancer with occult primary; mouth cancer; multiple endocrine neoplasia syndromes; multiple myeloma; multiple myeloma/plasma cell neoplasm; mycosis fungoides; myelodysplastic syndromes; myeloproliferative neoplasms; nasal cavity cancer; nasopharyngeal cancer; neuroblastoma; Non-Hodgkin lymphoma; nonmelanoma skin cancer; non-small cell lung cancer; oral cancer; oral cavity cancer; oropharyngeal cancer; osteosarcoma; other brain and spinal cord tumors; ovarian cancer; ovarian epithelial cancer; ovarian germ cell tumor; ovarian low malignant potential tumor; pancreatic cancer; papillomatosis; paranasal sinus cancer; parathyroid cancer; pelvic cancer; penile cancer; pharyngeal cancer; pineal parenchymal tumors of intermediate differentiation; pineoblastoma; pituitary tumor; plasma cell neoplasm/multiple myeloma; pleuropulmonary blastoma; primary central nervous system (CNS) lymphoma; primary hepatocellular liver cancer; prostate cancer; rectal cancer; renal cancer; renal cell (kidney) cancer; renal cell cancer; respiratory tract cancer; retinoblastoma; rhabdomyosarcoma; salivary gland cancer; Sezary syndrome; small cell lung cancer; small intestine cancer; soft tissue sarcoma; squamous cell carcinoma; squamous neck cancer; stomach (gastric) cancer; supratentorial primitive neuroectodermal tumors; T-cell lymphoma; testicular cancer; throat cancer; thymic carcinoma; thymoma; thyroid cancer; transitional cell cancer; transitional cell cancer of the renal pelvis and ureter; trophoblastic tumor; ureter cancer; urethral cancer; uterine cancer; uterine sarcoma; vaginal cancer; vulvar cancer; Waldenström macroglobulinemia; or Wilm's tumor. The premalignant condition can be Barrett's Esophagus. The autoimmune disease can be inflammatory bowel disease (IBD), Crohn's disease (CD), ulcerative colitis (UC), pelvic inflammation, vasculitis, psoriasis, diabetes, autoimmune hepatitis, multiple sclerosis, myasthenia gravis, Type I diabetes, rheumatoid arthritis, psoriasis, systemic lupus erythematosis (SLE), Hashimoto's Thyroiditis, Grave's disease, Ankylosing Spondylitis Sjogrens Disease, CREST syndrome, Scleroderma, Rheumatic Disease, organ rejection, Primary Sclerosing Cholangitis, or sepsis. The cardiovascular disease can be atherosclerosis, congestive heart failure, vulnerable plaque, stroke, ischemia, high blood pressure, stenosis, vessel occlusion or a thrombotic event. The neurological disease can be Multiple Sclerosis (MS), Parkinson's Disease (PD), Alzheimer's Disease (AD), schizophrenia, bipolar disorder, depression, autism, Prion Disease, Pick's disease, dementia, Huntington disease (HD), Down syndrome, cerebrovascular disease, Rasmussen's encephalitis, viral meningitis, neurospsychiatric systemic lupus erythematosus (NPSLE), amyotrophic lateral sclerosis, Creutzfeldt-Jacob disease, Gerstmann-Straussler-Scheinker disease, transmissible spongiform encephalopathy, ischemic reperfusion damage (e.g. stroke), brain trauma, microbial infection, or chronic fatigue syndrome. The pain can be fibromyalgia, chronic neuropathic pain, or peripheral neuropathic pain. The infectious disease can be a bacterial infection, viral infection, yeast infection, Whipple's Disease, Prion Disease, cirrhosis, methicillin-resistant staphylococcus aureus, HIV, HCV, hepatitis, syphilis, meningitis, malaria, tuberculosis, influenza.

[0475] As further described herein, the invention provides a kit comprising a reagent for carrying out the method. Similarly, the invention provides for the use of a reagent for carrying out the method. The reagent can be any useful reagent for carrying out the method. For example, the reagent can be an oligonucleotide or plurality of oligonucleotides and/or a composition as described above.

[0476] Kits

[0477] The invention also provides a kit comprising one or more reagent to carry out the methods of the invention. For example, the one or more reagent can be the one or more aptamer, a buffer, blocker, enzyme, or combination thereof. The one or more reagent may comprise any useful reagents for carrying out the subject methods, including without limitation aptamer libraries, substrates such as microbeads or planar arrays or wells, reagents for biomarker and/or microvesicle isolation (e.g., via chromatography, filtration, ultrafiltration, centrifugation, ultracentrifugation, flow cytometry, affinity capture (e.g., to a planar surface, column or bead), polymer precipitation, and/or using microfluidics), aptamers directed to specific targets, aptamer pools that facilitate detection of a biomarker/microvesicle population, reagents such as primers for nucleic acid sequencing or amplification, arrays for nucleic acid hybridization, detectable labels, solvents or buffers and the like, various linkers, various assay components, blockers, and the like. The one or more reagent may also comprise various compositions provided by the invention. In an embodiment, the one or more reagent comprises one or more aptamer of the invention. The one or more reagent can comprise a substrate, such as a planar substate, column or bead. The kit can contain instructions to carry out various assays using the one or more reagent.

[0478] In an embodiment, the kit comprises an oligonucleotide probe or composition provided herein. The kit can be configured to carry out the methods provided herein. For example, the kit can include an aptamer of the invention, a substrate, or both an aptamer of the invention and a substrate.

[0479] In an embodiment, the kit is configured to carry out an assay. For example, the kit can contain one or more reagent and instructions for detecting the presence or level of a biological entity in a biological sample. In such cases, the kit can include one or more binding agent to a biological entity of interest. The one or more binding agent can be bound to a substrate.

[0480] In an embodiment, the kit comprises a set of oligonucleotides that provide a particular oligonucleotide profile for a biological sample. An oligonucleotide profile can include, without limitation, a profile that can be used to characterize a particular disease or disorder. For example, the disease or disorder can be a proliferative disease or disorder, including without limitation a cancer. In some embodiments, the cancer comprises a breast cancer.

### EXAMPLES

### Example 1

### Identification of DNA Oligonucleotides that Bind a Target

[0481] The target is affixed to a solid substrate, such as a glass slide or a magnetic bead. For a magnetic bead preparation, beads are incubated with a concentration of target protein ranging from 0.1 to 1 mg/ml. The target protein is conjugated to the beads according to a chemistry provided by the particular bead manufacturer. Typically, this involves coupling via an N-hydroxysuccinimide (NHS) functional group process. Unoccupied NHS groups are rendered inactive following conjugation with the target.

[0482] Randomly generated oligonucleotides (oligos) of a certain length, such as 32 base pairs long, are added to a container holding the stabilized target. Each oligo contains 6 thymine nucleotides (a “thymine tail”) at either the 5 or 3 prime end, along with a single molecule of biotin conjugated to the thymine tail. Additional molecules of biotin could be added. Each oligo is also manufactured with a short stretch of nucleotides on each end (5-10 base pairs long) corresponding to amplification primers for PCR (“primer tails”). The sequences are shown absent the thymine tails or primer tails.

[0483] The oligonucleotides are incubated with the target at a specified temperature and time in phosphate-buffered saline (PBS) at 37 degrees Celsius in 500 microliter reaction volume.

[0484] The target/oligo combination is washed 1-10 times with buffer to remove unbound oligo. The number of washes increases with each repetition of the process (as noted below).

[0485] The oligos bound to the target are eluted using a buffer containing a chaotropic agent such as 7 M urea or 1% SDS and collected using the biotin tag. The oligos are amplified using the polymerase chain reaction using primers specific to 5′ and 3′ sequences added to the randomized region of the oligos. The amplified oligos are added to the target again for another round of selection. This process is repeated as desired to observe binding enrichment.

### Example 2

### Competitive Assay

[0486] The process is performed as in Example 1 above, except that a known ligand to the target, such as an antibody, is used to elute the bound oligo species (as opposed to or in addition to the chaotropic agent). In this case, anti-EpCAM antibody from Santa Cruz Biotechnology, Inc. was used to elute the aptamers from the target EpCAM.

### Example 3

### Screening and Affinity Analysis

[0487] All aptamers generated from the binding assays described above are sequenced using a high-throughput sequencing platform, such as the Ion Torrent from Life Technologies:

[0488] Library Preparation—Aptamers were pooled after ligating barcodes and adapter sequences (Life Technologies) according to manufacturer protocols. In brief, equimolar pools of the aptamers were made using the following steps: Analyzed an aliquot of each library with a Bioanalyzer™ instrument and Agilent DNA 1000 Kit or Agilent High Sensitivity Kit, as appropriate for the final library concentration. The molar concentration (nmol/L) of each amplicon library was detetrmined using the commercially available software (Agilent).

[0489] An equimolar pool of the library was prepared at the highest possible concentration.

[0490] The combined concentration of the pooled library stock was calculated.

[0491] The template dilution factor of the library pool was determined using the following equation:

Template Dilution Factor=(Library pool concentration [pM])/26 pM).

[0492] Template Preparation—Using a freshly diluted library, the aptamer pool resulting from binding assays provided above were sequenced using conventional sequencing protocols. High throughput (NextGen) sequencing methods can be used as desired.

[0493] Twenty aptamers were selected based on direct or competitive assays assessing binding to EpCAM (as described above).

[0494] Affinity Measurements—These twenty aptamers were then tested for binding affinity using an in vitro binding platform. SPR can be used for this step, e.g., a Biacore SPR machine using the T200 control software, as follows:

[0495] Dilute the antigen to a concentration of 32 nM.

[0496] Prepare necessary dilutions for kinetics, starting at 32 nM prepare two-fold dilutions of antigen down to 0.5 nM.

[0497] The Biacore 200 control software is programmed with the following conditions: Solution: HBS-EP+ Buffer; Number of cycles: 3; Contact time: 120 s; Flow rate: 30 μl/min; Dissociation time: 300 s; Solution: Glycine-HCl pH 2.5; Contact time: 120 s; Flow rate: 20 μl/min; Stabilization period: 0 s. The binding affinities of these aptamers are then measured using the SPR assay above, or an alternate in vitro assay assessing the aptamer for a desired function.

[0498] FIG. 5 shows the SPR data for aptamer BTX176881 (SEQ ID NO: 3). The figure comprises an association and dissociation graph of 1:1 fitting model of the biotinylated aptamers to EpCAM protein at the indicated concentrations (nM). Table 5 shows the calculated K_{d} values from the SPR measurements that are illustrated in FIG. 5. In addition, Table 5 shows the SPR data and calculated K_{d} values for BTX187269 (SEQ ID NO: 6) and Aptamer 4 (SEQ ID NO. 1).

TABLE 5
Calculated K_{D} values from SPR measurements

| Immobilized | | Conc | | K_{d} | | |
|---|---|---|---|---|---|---|
| aptamer | Analyte | (nM) | Response | (nM) | Full R² | Full Chi² |
| BTX176881 | EpCAM | 500 | 0.2434 | 8.40 | 0.989322 | 0.179008 |
| (SEQ ID | protein | 250 | 0.136 | 8.40 | 0.989322 | 0.179008 |
| No: 3) | | 100 | 0.0776 | 8.40 | 0.989322 | 0.179008 |
| BTX187269 | EpCAM | 500 | 0.2575 | 7.12 | 0.990323 | 0.215697 |
| (SEQ ID | protein | 250 | 0.1584 | 7.12 | 0.990323 | 0.215697 |
| NO: 6) | | 100 | 0.0551 | 7.12 | 0.990323 | 0.215697 |
| Aptamer 4 | EpCAM | 500 | 0.2742 | 10.10 | 0.986276 | 0.299279 |
| (SEQ ID | protein | 250 | 0.1618 | 10.10 | 0.986276 | 0.299279 |
| NO: 1) | | 100 | 0.0809 | 10.10 | 0.986276 | 0.299279 |

*K_{d}, R² and Chi² values by Global fitting for single reference method.

### Example 4

### Motif Analysis

[0499] The process of Example 3 is followed to identity a high affinity aptamer to a target of interest. Once a high affinity aptamer is identified, its sequence is then analyzed using a software program to estimate its two-dimensional folding structure. Well-known sequence alignment programs and algorithms for motif identification can be used to identify sequence motifs and reduce the dimensionality of even large data sets of sequences. Further, software programs such as Vienna and mfold are well-known to those skilled in the art of aptamer selection and can be used to further group sequences based on secondary structure motifs (shared shapes). See FIG. 3A and FIG. 3B for example structure predictions. Shared secondary structure of course, does not guarantee identical three-dimensional structure. Therefore “wet-lab” validation of aptamers is still useful as no one set of in silico tools has yet been able to fully predict the optimal aptamer among a set of aptamer candidates.

### Example 5

### Microvesicle-Based Aptamer Subtraction Assay

[0500] Circulating microvesicles are isolated from normal plasma (e.g., from individuals without cancer) using one of the following methods: 1) Isolation using the ExoQuick reagent according to manufacturer's protocol; 2) Ultracentrifugation comprising spin at 50,000 to 150,000g for 1 to 20 hours then resuspending the pellet in PBS; 3) Isolation using the TEXIS reagent from Life Technologies according to manufacturer's protocol; and 4) filtration methodology. The filtration method is described in more detail as follows:

[0501] Place syringe and filter (1.2 μm Acrodisc Syringe Filter Versapor Membrane Non-Pyrogenic Ref: 4190, Pall Life Sciences) on open 7 ml 150K MWCO column (Pierce concentrators, 150K MWCO (molecular weight cut off) 7 ml. Part number: 89922). Fill open end of syringe with 5.2 ml of filtered 1× PBS prepared in sterile molecular grade water.

[0502] Pipette patient plasma (900-1000 μl) into the PBS in the syringe, pipette mix twice

[0503] Filter the plasma into the 7 ml 150K MWCO column.

[0504] Centrifuge 7 ml 150K MWCO columns at 2000×g at 20° C. (16° C. to 24° C.) for 1 hour.

[0505] After 1 hour spin, pour the flow-through into 10% bleach to be discarded.

[0506] Visually inspect sample volume. If plasma concentrate is above the 8.5 ml graduation on the concentrator tube, continue to spin plasma sample at 10 minute increments at 2000×g at 20° C. (16° C. to 24° C.) checking volume after each spin until plasma concentrate is between 8.0 and 8.5 mls.

[0507] Pipette mix slowly on the column a minimum of 6 times and adjust pipette to determine plasma concentrate volume. If volume is between 100 μl and Target Volume, transfer plasma concentrate to previously labeled co-polymer 1.5 ml tube. If volume is still greater than Target Volume, repeat the above centrifugation step.

[0508] Pour ˜45 mls of filtered 1× PBS prepared in sterile molecular grade water into 50 ml conical tube for use in the next step.

[0509] Add the appropriate amount of filtered 1× PBS to reconstitute the sample to the Target Volume.

[0510] The microvesicles produced using any of the isolation methods will comprise a mixture of vesicle types and will be various sizes with the possible exception of the ultracentrifugation methods, which may favor isolating exosome size particles.

[0511] Randomly generated oligonucleotides (produced as described in Example 1 above) are incubated with the isolated normal vesicles in PBS overnight at room temperature or at 4 degrees Celsius.

[0512] The aptamers that do not bind to these vesicles are isolated by spinning down the vesicles at 50,000 to 150,000×g for 1 to 20 hours and collecting the supernatant.

[0513] The aptamer oligonucleotides are collected from the supernatant by running the mixture over a column containing streptavidin-coated beads. These aptamers are then added to vesicles isolated from diseased patients (using the same methods as above) and incubated overnight in PBS at room temperature or 4 degrees Celsius.

[0514] The vesicles are then spun at 50,000 to 150,000×g for 1 to 20 hours and the supernatant is discarded. The vesicles are resuspended in PBS and lysed using SDS or some similar detergent.

[0515] The aptamers are then captured by running the lysis mixture over a column of streptavidin-coated beads. The isolated aptamers are then subjected to a round of PCR to amplify the products.

[0516] The process is then repeated for a set number of times, e.g., 5 times. The remaining aptamer pool has been depleted of aptamers that recognize microvesicles found in “normal” plasma. Accordingly, this method can be used to enrich the pool in aptamers that recognize cancer vesicles. See FIG. 4.

### Example 6

### Detection of Microvesicles Using Anti-EpCAM Aptamers

[0517] Aptamers can be used as binding agents to detect a biomarker. In this Example, aptamers are used as binding agents to detect EpCAM protein associated with microvesicles.

[0518] FIGS. 6A-D illustrate the use of an anti-EpCAM aptamer (Aptamer 4; SEQ ID NO. 1) to detect a microvesicle population in plasma samples. Plasma samples were obtained from three men with prostate cancer and three men without prostate cancer (referred to as controls or normals). Antibodies to the following microvesicle surface protein antigens of interest were conjugated to microbeads (Luminex Corp, Austin, Tex.): FIG. 6A) EGFR (epidermal growth factor receptor); FIG. 6B) PBP (prostatic binding protein; also known as PEBP1 (phosphatidylethanolamine binding protein 1)); FIG. 6C) EpCAM (epithelial cell adhesion molecule); and FIG. 6D) KLK2 (kallikrein-related peptidase 2). Microvesicles in the plasma samples were captured using the bead-conjugated antibodies. Fluorescently labeled Aptamer 4 was used as a detector in the microbead assay. FIGS. 6A-D show the average median fluorescence values (MFI values) detected for the bead-captured and Aptamer 4 detected microvesicles. Each plot individually shows the three cancer (C1-C3) and three normal samples (N1-N3). These data show that, on average, the prostate cancer samples have higher levels of microvesicles containing the target proteins than the normals.

### Example 7

### Negative and Positive Selection of Aptamers

[0519] Aptamers can be used in various biological assays, including numerous types of assays which rely on a binding agent. For example, aptamers can be used instead of antibodies in immune-based assays. This Example provides an aptamer screening method that identifies aptamers that do not bind to any surfaces (substrates, tubes, filters, beads, other antigens, etc.) throughout the assay steps and bind specifically to an antigen of interest. The assay relies on negative selection to remove aptamers that bind non-target antigen components of the final assay. The negative selection is followed by positive selection to identify aptamers that bind the desired antigen.

[0520] Preliminary experiments were done with five DNA aptamer libraries with 10¹⁵ sequences each and variable lengths (60, 65, 70, 75, 80-mers) were pre-amplified and strand separated so that forward strand (non-biotinylated) serves as an aptamer. Multiple rounds of negative selection and positive selection were performed. Before each round, the recovered aptamer products were PCR amplified and strand separated using standard methodology. Selections were performed as follows:

[0521] Negative Selection

[0522] 1. Prepare bead negative Selection Mix: Incubate 1200 non-magnetic beads with standard blocking agent for 20 min.

[0523] 2. Add 50 μl of aptamer library (5 libraries total) to a PCR strip tube with 4.5 μl of each bead mixture. Incubate for 2 h at 37° C. with agitation at 550 rpm.

[0524] 3. Pre-wet filter plate (1.2 μm, Millipore) with PBS-BN buffer. Add 150 μl PBS-BN.

[0525] 4. Transfer samples from the PCR strip tubes to the filter plate, incubate for 1 h at room temperature with agitation at 550 rpm.

[0526] 5. Collect flow-through from filter plate into a collection (NBS) plate using a vacuum manifold.

[0527] 6. Concentrate and clean samples to remove excess materials as desired.

[0528] The negative selection process is repeated up to 6-7 times.

[0529] Positive Selection

[0530] Before starting, conjugate the protein biomarkers of interest (here, SSX4, SSX2, PBP, KLK2, SPDEF) to desired non-magnetic microbeads using conditions known in the art. The recombinant purified starting material included: SPDEF recombinant protein from Novus Biologicals (Littleton, Colo., USA), catalog number H00025803-P01; KLK2 recombinant protein from Novus, catalog number H00003817-P02; SSX2 recombinant protein from Novus, catalog number H00006757-P01; PBP recombinant protein from Fitzgerald Industries International (Action, Mass., USA), catalog number 30R-1382; SSX4 recombinant protein from GenWay Biotech, Inc. (San Diego, Calif., USA), catalog number GWB-E219AC.

[0531] 1. Bead blocking: Incubate a desired number of each bead (8400×number of aptamer libraries (5) x an overage factor of (1.2)) with a starting block for 20 min.

[0532] 2. Mix 50 μl of each aptamer library sample to PCR strip tubes add 2.3 μl of bead sample with particular antigen. Incubate for 2 h at 37° C. with agitation at 550 rpm.

[0533] 3. Pre-wet filter plate (1.2 μm, Millipore) with PBS-BN buffer. Add 150 μl PBS-BN.

[0534] 4. Transfer samples from the PCR strip tubes to the filter plate, incubate for 1 h at room temperature with agitation at 550 rpm.

[0535] 5. Wash 3× with PBS-BN, add 50 μl of PBS and collect samples from the top of the filter to the 1.5 ml tubes.

[0536] The positive selection is repeated up to 16 times. Certain rounds of positive selection have additional steps to treat the recovered RNA (i.e., remaining aptamer candidates) as follows:

[0537] Round 8 of Positive Selection was Modified as Follows:

[0538] 1. After the third wash (PBS-BN) 25 μl of sample were collected from the top of the filter into 1.5 ml tubes.

[0539] 2. The filter plate was incubated at 45° C. for ˜10 min and washed immediately using vacuum. The plate was washed three more times with PBS-BN.

[0540] 3. 50 μl of PBS were added to the plate and step 2 was repeated.

[0541] 4. After the last wash, 25 μl of PBS was added to the wells. The samples were mixed well and collected from the top of the filter into 1.5 ml tubes.

[0542] Round 9 of positive selection was modified as follows:

[0543] 1. After the final wash in step 5), 5 mg/ml Streptavidin-PE was added to the aptamer mixture and incubated for 30 min at room temperature with agitation at 550 rpm.

[0544] 2. Samples on filter plate were washed 3× with PBS-BN (+additional 500 mM NaCl).

[0545] 3. One additional wash with regular PBS-BN was performed.

[0546] 4. 50 μl of PBS was added to the samples followed by collection as above into 1.5 ml tubes.

[0547] 5. Samples stored at −20° C.

[0548] Round 14 of Positive Selection was Modified as Follows:

[0549] Before start this round, the antigens of interest (SSX4, SSX2, PBP, KLK2, SPDEF) were conjugated to carboxylated magnetic beads using methods known in the art.

[0550] 1. Bead blocking: take desired number of each non-magnetic bead (3000× number of aptamer libraries (5) x an overage factor of 1.2), add starting block (3:1, blocking per 1200 beads), make 5 mixes of 4 antigens and supplement each with different target antigen conjugated to magnetic beads (see Table 6 below, wherein the antigens are conjugated to non-magnetic beads except as indicated), incubate 20 min.

TABLE 6
Bead blocking mixtures

| Blocking | | Magnetic bead |
|---|---|---|
| Mix | Non-magnetic bead antigens | antigens |
| 1 | SSX4 + PBP + KLK2 + SPDEF | SSX2 |
| 2 | SSX2 + PBP + KLK2 + SPDEF | SSX4 |
| 3 | SSX2 + SSX4 + KLK2 + SPDEF | PBP |
| 4 | SSX2 + SSX4 + PBP + SPDEF | KLK2 |
| 5 | SSX2 + SSX4 + PBP + KLK2 | SPDEF |

[0551] 2. Add 50 μl of aptamer libraries to PCR strip tubes, add bead mixtures with target antigen on magnetic beads to the tubes with pre-selected corresponding aptamer library and incubate for 2 h at 37° C. with agitation at 550 rpm.

[0552] 3. Pre-wet filter plate with PBS-BN buffer, add 150 μl PBS-BN.

[0553] 4. Transfer samples from PCR strip tubes to filter plate, incubate 1 h room temperature with agitation at 550 rpm.

[0554] 5. After last (standard) wash, add 5 μg/ml Streptavidin-PE, incubate for 30 min room temperature with agitation at 550 rpm;

[0555] 6. Wash 3× with PBS-BN (+ additional 500 mM NaCl).

[0556] 7. Perform one additional wash with regular PBS-BN.

[0557] 8. 50 μl of PBS was added to the samples followed by collection as above into 1.5 ml tubes.

[0558] 9. Remove the magnetic beads using a magnetic stand, and replace with fresh PBS buffer.

[0559] 10. Samples stored at −20° C. for subsequent DNA extraction and strand separation.

[0560] Optional steps implemented in the later round of positive selection are intended to increase stringency of aptamer binding (e.g., increased heat or salt concentration).

### Example 8

### Discovery and Characterization of Anti-EpCAM Aptamers

[0561] In this Example, an aptamer to EpCAM identified using the technique in the Example above is characterized. After selection for a pool of EpCAM binding aptamers as described above, the aptamer library was sequenced using the Ion Torrent standard protocol (Life Technologies, Carlsbad, Calif.). Lead candidates were selected as those having (a) high abundant motifs across all read sequences with full expected length product and (b) strong secondary structure (FIG. 7B).

[0562] Aptamers wre selected for EPCAM protein conjugated to MicroPlex beads in competition with SSX4, SSX2, PBP, KLK2, and SPDEF recombinant proteins. A portion of the aptamers was selected in initial rounds against EpCAM that was attached to an Fc tag, and after round 8 the selection was switched to EPCAM with a Histidine tag. Another portion of the aptamers was selected in initial rounds against EpCAM that was attached to a Histidine tag, and after round 8 the selection was switched to EPCAM with an Fc tag. Methods of using Fc and histidine tags for protein purification and capture are known to those of skill in the art.

[0563] Aptamer Characterization

[0564] CAR003 is an aptamer candidate identified using the above methodology. As an RNA aptamer, CAR003 with alternate tail sequence has the following RNA sequence (SEQ ID NO. 5):

[0565] 5′-auccagagug acgcagcagu cuuuucugau ggacacgugg uggucuagua ucacuaagcc accgugucca-3′

[0566] CAR003 was further characterized. EpCAM aptamer CAR003 is modified as desired by attachment of a biotin moiety on the 5′end or 3′ end. The biotin can be used to bind the aptamer using a streptavidin-biotin system, e.g., for labeling, capture and/or anchoring. FIG. 7B illustrates the optimal secondary structure of CAR003 with a minimum free energy (AG) of −30.00 kcal/mol. For purposes of illustration, the aptamer is shown as an RNA aptamer (SEQ ID NO. 5) corresponding to the CAR003 DNA sequence (SEQ ID NO. 4).

[0567] Synthesis and purification. The selected CAR003 aptamer was re-synthesized using AKTA OligoPilot 100 Synthesizer (GE Healthcare Life Sciences Corp., Piscataway, N.J.) with a 3′Biotin and final detritylation. The product was purified with anion exchange chromatography by FPLC. Several fractions after FPLC were combined as shown as the indicated Pools 1-3 in FIG. 7C. The figure comprises an FPLC chromatogram with all product and fractions assigned in pools after checking quality on gel. FIG. 7D illustrates a SYBR GOLD stained gel with different FPLC fractions of CAR003 aptamer after synthesis. Different fractions were combined in pools based on amount of unfinished chains in order high to low (pool 1-pool 3). The pools 1-3 correspond to those indicated in FIG. 7C.

[0568] CAR003 aptamer characterization. Purified CAR003 aptamer was tested for binding to recombinant EPCAM protein with a polyhistidine tag (“His tagged”) using the following internally developed assay. Anti-His tag conjugated beads were mixed with EPCAM-His tagged protein. The aptamer to be tested was labeled with streptavidin-phycoerythrin (SA-PE). The EpCAM-beads and SA-PE labeled aptamers were mixed. Binding was determined as median flourescent value in a bead assay as described herein. MFI values (FIG. 7E-F) increase with increased binding of the SA-PE labeled aptamer to the recombinant EpCAM. FIG. 7E-F illustrate binding of CAR003 to EPCAM protein in 25 mM HEPES with PBS-BN (PBS, 1% BSA, 0.05% Azide, pH 7.4) (FIG. 7E) or in 25 mM HEPES with 1 mM MgCl₂ (FIG. 7F). EPCAM aptamer Aptamer 4 (see above) was used for comparison. As shown in the figures, CAR003 pool 3 more efficiently binds its target in the presence of MgCl₂ (FIG. 7F) than in the presence of BSA (FIG. 7E).

[0569] To understand its performance further, CAR003 binding was tested in the presence of both BSA and MgCl₂ in various buffers. FIG. 7G illustrates CAR003 binding to EpCAM in the indicated salts with and without addition of bovine serum albumin (BSA). Again, CAR003 binding to EpCAM is more efficient when BSA is not present. Additionally, 150 mM NaCl was tested but did not appear to improve CAR003 performance over MgCl₂.

[0570] Another factor which might influence performance of aptamer is denaturing with different salt compositions. FIG. 7H illustrates the effect of denaturing on CAR003 binding to EPCAM protein. As seen from the chart, denaturing of the aptamer has a postive effect on CAR003 binding to EpCAM similar as the effect on CAR003 from MgCl₂. However, denaturing in the presence of MgCl₂may not synergistically improve binding of CAR003 to EpCAM. Interestingly, CAR003 appeared more stable compared to control Aptamer 4 in the conditions tested.

[0571] CAR003 affinity to EpCAM in the bead assay environment was assessed in the same assay as above with aptamer titrated across a constant input of antigen. FIG. 7I illustrates titration of aptamers against EPCAM recombinant protein (constant input 5 μg). Under the conditions tested, Aptamer 4 had a higher affinity to EPCAM protein compared to CAR003 as suggested from saturation level starting at 5 μg of aptamer input.

[0572] In order to evaluate specificity of CAR003, it was tested using Western Blot against EPCAM recombinant protein, and controls comprising bovine serum albumin (BSA) and human serum albumin (HSA). FIG. 7J illustrates a Western blot with CAR003 aptamer versus EPCAM his-tagged protein, BSA, and HSA (5 μg each). The gel was blocked 0.5% F127 and probed with ˜50 μg/ml CAR003 biotinylated aptamer, fraction 3. The blot was visualized with NeutrAvidin-HRP followed by SuperSignal West Femto Chemiluminescent Substrate. The Western blot probed with CAR003 aptamer showed a clear preference of the aptamer to EPCAM protein over the albumins.

[0573] CAR003 test with plasma samples. Plasma samples from five prostate cancer and five normal subjects were tested with CAR003 to detect microvesicles using bead-conjugated proteins to capture the microvesicles and SA-PE labeled aptamer to detect the vesicles. SA-PE labeled Aptamer 4 detector was used as control. Fold changes of Cancer over Normal are shown in Table 7. The fold changes are shown without normalization (“Raw”) or with normalization to a negative control. The vesicles were captured with bead conjugated antibodies to SSX4, PBP, SPDEF, EPCAM, KLK2 and SSX2 as indicated.

TABLE 7
CAR003 to detect microvesicles

| | | SSX4 | PBP | SPDEF | EPCAM | KLK2 | SSX2 |
|---|---|---|---|---|---|---|---|
| Raw | Standard protocol | 0.87 | 0.39 | 0.71 | 0.63 | 0.93 | 0.87 |
| | Incubation in | 0.77 | 0.39 | 0.69 | 0.6 | 0.91 | 0.81 |
| | presence of 1 mM | | | | | | |
| | MgCl2 and absence | | | | | | |
| | of PBS-BN | | | | | | |
| | Aptamer 4 control | 0.78 | 0.67 | 0.81 | 0.72 | 1.19 | 0.79 |
| | (standard protocol) | | | | | | |
| Normalized | Standard protocol | 1.49 | 0.84 | 1.13 | 1.17 | 1.5 | 1.38 |
| to | Incubation in | 1.27 | 0.83 | 1.08 | 1.1 | 1.46 | 1.29 |
| Negative | presence of 1 mM | | | | | | |
| control | MgCl2 and absence | | | | | | |
| | of PBS-BN | | | | | | |
| | Aptamer 4 control | 1.18 | 0.96 | 1.11 | 1.04 | 1.82 | 1.1 |
| | (standard protocol) | | | | | | |

[0574] Under the conditions tested, the samples detected with CAR003 had lower MFI values as compared to detection with Aptamer 4, whereas CAR003 had a better signal-to-noise ratio and showed better separation between cancer and normal samples with SSX4, SPDEF, EPCAM and SSX2 capturing markers.

[0575] Control Aptamer

[0576] The characteristics of the aptamers (size, stability, binding affinity and specificity, etc) can be compared against control aptamers specific to EpCAM or other targets. For example, the aptamers are compared to the anti-VEGF aptamer 5′ biotin-CA ATT GGG CCC GTC CGT ATG GTG GGT (SEQ ID NO. 7) as described in Kaur and Yung, 2012.

### REFERENCES

[0577] 1. Müller, J., et al. “Selection of high affinity DNA-aptamer for activated protein C using capillary electrophoresis.” Research in Pharmaceutical Sciences 7.5 (2012.): S987.

[0578] 2. Cerchia, L., and V. de Franciscis. “Nucleic Acid Aptamers Against Protein Kinases.” Current medicinal chemistry 18.27 (2011): 4152-4158.

[0579] 3. Wu, Jie, et al. “Identification, Characterization and Application of a G-Quadruplex Structured DNA Aptamer against Cancer Biomarker Protein Anterior Gradient Homolog 2.” PloS ONE 7.9 (2012): e46393

[0580] 4. Mitkevich, Olga V., et al. “DNA aptamers detecting generic amyloid epitopes.” Prion 6.4 (2012): 400-406.

[0581] 5. Kaur H, Yung L-Y L (2012) Probing High Affinity Sequences of DNA Aptamer against VEGF₁₆₅. PLoS ONE 7(2): e31196, doi:10.1371/journal.pone.0031196.

### Example 9

### Aptamer Target Identification

[0582] In this Example, aptamers conjugated to microspheres are used to assist in determining the target of two aptamers identified by library screening methods as described above. The general approach is shown in FIG. 9. The approach is used to verify the targets of CAR003, an aptamer identified by library screening to recognize EpCAM. See decription above for CAR003. In this approach, the sequence of CAR003 is randomly rearranged before linkage to the microspheres. The microspheres are used as controls to bind to targets that are similar but not identical to the intended target molecule.

[0583] The protocol used is as follows:

[0584] 1) The candidate aptamers (here, CAR003) and negative control aptamers (here, randomly arranged CAR003) are synthesized with modifications to allow capture (here, the aptamers are biotinylated) and crosslinking (here, using the Sulfo-SBED Biotin Label Transfer Reagent and Kit, Catalog Number 33073 from Thermo Fisher Scientific Inc., Rockford, Ill., to allow photocrosslinking).

[0585] 2) Each of the aptamers is individually mixed with microvesicles having the target of interest (here, BrCa cell line microvesicles).

[0586] 3) After incubation to allow the aptamers to bind target, ultraviolet light is applied to the mixtures to trigger crosslinking of the aptamers with the microvesicle targets.

[0587] 4) The microvesicles are lysed, thereby releasing the crosslinked aptamer-target complex into solution.

[0588] 5) The crosslinked aptamer-target complexes are captured from solution using a streptavidin coated substrate.

[0589] 6) The crosslinked aptamer-target complexes for each aptamer are run individually on SDS-PAGE gel electrophoresis. The captured protein targets are visualized with Coomasie Blue staining.

[0590] 7) The crosslinking and binding steps may be promiscuous so that multiple bands including the intended target but also random proteins will appear on each of the gels. The intended target will be found in a band that appears on the gel with the candidate aptamer (here, CAR003) but not the related negative control aptamers (here, randomly arranged CAR003). The bands corresponding to the target are excised from the gel.

[0591] 8) Mass spectrometry (MS) is used to identify the aptamer target from the excised bands.

### Example 10

### Aptamers to Breast Cancer (BrCa) Derived Microvesicles

[0592] In this Example, an aptamer library is screened to identify aptamers that distinguish between microvesicles circulating in the blood of breast cancer patients and microvesicles circulating in the blood of healthy, control individuals (i.e., without breast cancer).

[0593] Microvesicles were isolated from plasma of a pool of 60 breast cancer patients (BrCa+). Microvesicles were also isolated from pool of 60 non-cancer samples (BrCa−). Microvesicles were isolated from the plasma using ultracentrifugation (120,000×g). Microvesicles were in the pellet from the ultracentrifugation. The supernatant from the ultracentrifugation was saved to use as a control. The microvesicles from both sample types were conjugated to MagPlex beads (Luminex Corp, Austin Tex.). Optionally, the isolated microvesicles are incubated with anti-HSA/IgG/Fibrinogen beads to remove these highly abundant blood proteins. However, the conjugation step can be optimized to favor conjugation of the microvesicles such that removal of highly abundant proteins may be less of an issue.

[0594] The aptamer library used consisted of a 2′F SUL1 RNA aptamer library. The sequence is 5′-GGGAGGACGAUGCGG-N40-CAGACGACUCGCUGAGGAUCCGAGA-3′ (SEQ ID NO. 8). The aptamer library consists of three sections: Forward primer—15 nucleotides, variable region—40 nucleotides; reverse primer—25 nucleotides. All pyrimidines (C and U) were 2′Fluoro modified.

[0595] The aptamer library was incubated with either the cancer or control microvesicle-conjugated beads. Thirteen rounds of positive selection for aptamers that bind the microvesicles were performed in parallel for both types of samples. See Example 11 below for detailed protocol of the positive selection steps. Negative selection was not performed.

[0596] The aptamers that were retained from the above positive selection were sequenced using Next Generation sequencing technology consisting of Ion Torrent NGS (Life Technologies, Inc., Carlsbad, Calif.). The MiSeq system may be used also (Illumina, Inc., San Diego, Calif.). The sequences are compared to identify aptamers that are found in the cancer samples and not the control samples, and vice versa. Such aptamers provide candidates that can be used to distinguish between BrCa and non-BrCa samples.

[0597] A number of representative sequences obtained from these procedures are shown in Table 8. The sequences in the table were identified in the aptamer pools from selection against BrCa microvesicles but were not in the aptamer pools selected against non-cancer samples. In Table 8, the sequences are shown 5′ to 3′ from left to right, wherein each complete sequence consists of a 5′ leader sequence 5′-GGGAGGACGAUGCGG (SEQ ID NO. 9) followed by the indicated Variable Sequence followed by the 3′ tail sequence 5′-CAGACGACUCGCUGAGGAUCCGAGA (SEQ ID NO. 10). Each sequence is derived from a library having a leader and tail (see description above) with a variable sequence between. It is understood that the nucleotide sequences that are disclosed in Table 8 can also be modified to the extent that resulting modifications result in an aptamer having about 50, 55, 60, 65, 70, 75, 80, 85, 90, 95, 96, 97, 98, and 99 percent homology to the disclosed sequence and retain the functionality of binding to microvesicle antigens or functional fragments thereof.

TABLE 8
BrCa microvesicle aptamer candidate sequences

| | SEQ | |
|---|---|---|
| | ID | |
| ID | NO. | Variable Sequence |
| BRCA_APT1_RNA | 11 | CGCGUCUUCCCCGCAUUGCCGCAAUUGCCAUACAUUAAUA |
| BRCA_APT2_RNA | 13 | GUCCGGAACGCCUCGAUCCUCGCAUAAUAUGAUACGUCUG |
| BRCA_APT3_RNA | 15 | GUCCAUGGUACGCCUCGAUUCCGCCCAUACAUGCAUGUAA |
| BRCA_APT4_RNA | 17 | CACUAUCCGUUUGUCCGUCCUCUUGUGGUAUUGCGCAUGC |
| BRCA_APT5_RNA | 19 | UCUUCCAUCUGGUCGCGAUACAGAAUACGAUUAACAUAAA |
| BRCA_APT6_RNA | 21 | GAUCACGCUGCCCUUUGUUUAAGGCCUUUAUACAAACGCA |
| BRCA_APT7_RNA | 23 | UAUUCGCCAGUCACAUCAACUAUGAUGACGCUUGACUGGA |

[0598] Each sequence in Table 8 is synthesized in two variants for further investigation: 5′ biotinylated and 3′ biotinylated. This provides aptamer variants that can be captured at the 5′ end or the 3′ end as desired. The aptamers are further synthesized with each pyrimidine (C and U) 2′Fluoro modified.

[0599] The DNA sequence corresponding to each RNA sequence in Table 8 is provided in the sequence listing, where the DNA sequence directly follows its corresponding RNA sequence. For example SEQ ID NO. 12 is the DNA sequence corresponding to RNA sequence SEQ ID NO. 11, etc. The DNA forms of the aptamers are synthesized for further characterization as well.

[0600] The aptamers above were identified using positive selection for aptamers which recognize BrCa and non-BrCa microvesicles conjugated to microspheres.

### Example 11

### Aptamer Library Selection Protocol

[0601] This Example provides the protocol for SUL1 RNA library selection performed in the Example above. The protocol can be followed for other aptamer libraries and sample input as desired.

[0602] Preparation

[0603] The working space is cleaned with 80% EtOH before working.

[0604] Beads are MagPlex beads (Luminex Corp., Austin, Tex.). Other beads can be substituted as desired.

[0605] Buffers/Reagents to Prepare:

[0606] MilliQ water

[0607] 100 mM MgCl₂

[0608] 5× Transcription Buffer (200 mM Tris pH 7.9)

[0609] 1× PBS

[0610] 1× PBS with 3 mM MgCl₂

[0611] 10× PBS

[0612] Selection buffer (1× PBS with 0.1% BSA and 3 mM MgCl₂)

[0613] Before starting with selection, remove the bead storage buffer, and wash beads with 1× PBS w/3 mM MgCl₂ 1 times (200 uL total in all 4 tubes). 200,000 beads per selection are used.

[0614] Binding 2′F SUL1 RNA Pool to Microvesicle Coated Magnetic Beads

[0615] Abbreviations: TK—Transcription; NTC—No template control.

[0616] Steps:
[0617] 1. 1^{st} Round: Mix 1 nmol purified 2′F SUL1 RNA with 20 μl of resuspended beads (conjugated with microvesicle). 10 uL of 10× PBS+1% BSA, 3 μl 100 mM MgCl₂, and 47 uL H₂O. This gives a final concentration of 1× PBS, 0.1% BSA, 3 mM MgCl₂.
   [0618] 1.1 The addition of MgCl₂in this step gives a concentration of 3 mM MgCl₂. This is the binding concentration for the entire process.
   [0619] 1.2 Following Rounds: Mix 20 μl of transcription product (15 mM MgCl₂ inside) with 20 μl of washed microvesicle coated beads, plus 9 uL 10× PBS with 1% BSA, 51 uL H₂O. No additional MgCl₂ is needed because the MgCl₂in the diluted transcription product (TK) provides a final concentration of 3 mM MgCl₂.
[0620] 2. Incubate for 30 min at 37° C., shake at 1000 rpm, and pipet mix every 10 minutes.
[0621] 3. Wash the beads:
   [0622] 3.1 One washing cycle comprises:
      [0623] 3.1.1 Remove the beads from the magnet
      [0624] 3.1.2 Resuspend beads in 100 μl 1× PBS+3 mM MgCl₂ off the magnet.
      [0625] 3.1.3 Incubate sample for 30 seconds off of the magnet.
      [0626] 3.1.4 Place the sample back onto the magnet, and wait until the beads are on the side.
      [0627] 3.1.5 Remove and discard the supernatant.
      [0628] 3.1.6 Resuspend in 100 μl 1× PBS+3 mM MgCl₂+0.1% BSA off of the magnet.
      [0629] 3.1.7 Incubate sample for 3 minutes off of the magnet.
      [0630] 3.1.8 Place the sample back onto the magnet, and wait until the beads are on the side.
      [0631] 3.1.9 Remove and discard the supernatant
   [0632] 3.2 1^{st} Round: Place bead mixture on a magnet and remove the supernatant. Wash once with 100 μl 1× PBS+3 mM MgCl₂+0.1% BSA (by pipette mixing the beads), and discard buffer.
   [0633] 3.3 Following Rounds: Increase the washing steps every second round by one more washing step up to 3 washing steps.
[0634] 4. Add 55 μl MilliQ water to the bead sample.
[0635] 5. Elute the RNA by incubating the bead sample for 5 min at 80° C.
   [0636] 5.1 Check if there is 50 μl, if not spin the sample down to spin down the condensed water off the top.
   [0637] 5.2 Transfer the supernatant to a new vial. Work quickly to avoid the strands rebinding the beads.
      [0638] 5.2.1 Use 50 μl eluate for the following RT-PCR and store the rest at −20° C.

[0639] RT-PCR of Recovered Aptamer Candidates

[0640] Tips

[0641] The rest of the RT-PCR sample and the TK-PCR sample is stored at −20° C.

[0642] RNA can be stored at 4° C. for ˜1 h

[0643] RT-PCR product can be stored overnight at 4° C.

[0644] Proceed to the next selection cycle for optimal RNA quality immediately after transcription.

[0645] Avoid vortexing RNA

[0646] Mix on ice

[0647] Use 0.5 ml PCR tubes

[0648] Every RT-PCR should have a no-template control (NTC) with water instead of template

[0649] Do not freeze-thaw DTT more than one time
[0650] 6. Prepare a Master Mix before the first round per Table 9, check it with 0.5 pmol RNA and store aliquots of 48 μl at −20° C. until usage.

TABLE 9
RT-PCR master mix

| | Volume (μl)/ | Final | |
|---|---|---|---|
| Reagent | reaction | concentration | |
| 5x Colorless GoTaq Flexi | 20 | 1x | |
| Buffer Promega cat# M890A | | | |
| 5 x first strand buffer | 4 | 0.2 x | |
| (Invitrogen) lot# 1300427 | | | |
| 100 mM DTT | 2 | 2 | mM |
| 100 μM SUL1 F primer | 1 | 1 | μM |
| 100 μM SUL1 R primer | 1 | 1 | μM |
| 100 mM MgCl₂ | 1.5 | 1.5 | mM |
| 25 mM (each) dNTPs | 1.2 | 300 | μM |
| MilliQ water | 17.3 | | |
| Total | 48 | | |

[0651] 7. Add 50 μl MilliQ water as negative control (NTC) (pipette this first) or 50 μl selection eluate. Pipet mix.
[0652] 8. Incubate at 65° C. for 5 min.
[0653] 9. After cooling to 4° C., add:
   [0654] 9.1 1 μl Superscript II Reverse Transcriptase (Invitrogen, cat#18064) (200 U/μl)
   [0655] 9.2 1 μI GoTaqFlexi DNA polymerase (5 units/μ) Promega cat#M8305.

### PCR—Program (SARTPCR)

[0656] a) 10 min 54° C. (This step is only for reverse transcriptase, should more rounds be needed, do not repeat step A.)
[0657] b) 1 min 95° C.
[0658] c) 1 min 60° C.
[0659] d) 1 min 72° C.
[0660] 10. Cycle steps b-d for
   [0661] 10.1 1^{st} round b-d 4 cycles. Run 5 μL PCR products on a 4% agarose gel.
      [0662] 10.1.1 Subsequent rounds: The amount of RNA is decreased after the first round, leading to an increase in required PCR-cycles. To determine the number of cycles needed each time, check the band intensity from the agarose gel from the previous round of selection. Use that number of cycles to start the next round of RT-PCR. Note: Always check results on an agarose gel.
         [0663] 10.1.1.1 Agarose gel results: product band should be seen at the target length. The band intensity should be about the same as the 50 bp ladder band (if not a little less intense). If the band is not intense enough (barely visible), cycle an appropriate amount more and re-check on an agarose gel.

[0664] Transcription

[0665] All mixing performed on ice. Prepare transcription Master Mix per Table 10 and store aliquots of 85.7 μl at −20° C. until use.
[0666] 11. Verify pH of stock 200 mM Tris pH 7.9 before use. A change in pH over time may cause problems with the transcription.

TABLE 10
Transcription (TK) Master Mix for SUL1 library

| | Volume (μl) for | Volume (μl) for | Final |
|---|---|---|---|
| Reagent | one reaction | 20 reactions | concentration |
| 5x Transcription buffer | 20 | 400 | 1x |
| (200 mMTris, pH 7.9) | | | |
| 100 mM DTT | 5 | 100 | 5 mM |
| 100 mM ATP | 1 | 20 | 1 mM |
| 100 mM GTP | 1 | 20 | 1 mM |
| 100 mM 2′ F-dUTP | 3 | 60 | 3 mM |
| 100 mM 2′ F-dCTP | 3 | 60 | 3 mM |
| 100 mM MgCl₂ | 15 | 300 | 15 mM |
| MilliQ water | 37 | 740 | |
| Total volume | 85 | 1700 μl | |

[0667] 12. Add 10 μl RT-PCR product to the mastermix.
[0668] 13. Add 1 μl RNasin (40 units/μ)
   [0669] 13.1 Promega Recombinant RNasin Ribonuclease Inhibitor cat#N2515/N2511
[0670] 14. Add 4 μl T7 Y639F mutant polymerase (25U/μl use: 100U total per reaction)
[0671] 15. Perform the reaction for 30 min at 37° C.
[0672] 16. Use the transcription-product directly for the next selection round. If the next step is not feasible, freeze transcription product at −20 C.

[0673] Subsequent Rounds

[0674] Repeat the bead incubation, the RT-PCR and transcription as often as needed. Try to have similar band intensity of the RT-PCR product for the sample in all rounds as noted above.

[0675] Binding Assay

[0676] A binding assay is performed after desired rounds of selection to determine to assess non-specific binding of cancer selected aptamers to control beads (conjugated to supernatant from plasma ultracentrifugation, see above) and likewise for non-cancer control samples. Binding assays can also be performed to assess binding of selected aptamers against the intended target microvesicles.

[0677] Cherenkov protocol: Performed using ³²P radioactively labeled aptamer library.

[0678] Final concentration of selection buffer: 1× PBS+1 mM MgCl₂+0.01% BSA pH 7.4

[0679] Wash buffer: 1× PBS+3 mM MgCl₂ pH 7.4
[0680] 1. Remove microvesicle samples from −80° C. freezer and thaw.
[0681] 2. Place beads on magnet (200,000 per sample experiment), remove bead storage buffer.
[0682] 3. Wash 1×200 μL for 1 minute each with 1× PBS, 3 mM MgCl₂ buffer. Pool beads to make 200,000 in one tube.
[0683] 4. Resuspend beads in 70 μL of the selection buffer. (10 μl of 10× PBS, 1% BSA+3 μL 100 mM MgCl₂+57 μL H₂O per sample).
[0684] 5. Add 30 μL radioactively labeled RNA aptamer library to their respective sample.
[0685] 6. Incubate shaking at 1000 rpm at 37° C. for 30 min.
[0686] 7. Place samples on a magnet.
[0687] 8. Remove and save supernatant.
[0688] 9. Wash beads with 200 μL wash buffer 1× PBS 3 mM MgC1₂ pH 7.4, incubating off the magnet for 3 minute.
[0689] 10. Place samples on the magnet, remove and save wash solution.
[0690] 11. Repeat steps 9, 10.
[0691] 12. Add 100 μL water to the sample, pipette mix.
[0692] 13. Heat at 80° C. for 5 minutes.
[0693] 14. Place samples on a magnet, remove supernatant, and save.
[0694] 15. Resuspend beads in 100 μL water.
[0695] 16. Measure radioactivity of every fraction using scintillation counter.
[0696] 17. Analyze amount of background binding present.

[0697] Negative Selection

[0698] As desired, a negative selection step is added prior to incubating the aptamer library with the beads conjugated to the target microvesicles (i.e., procedure “Binding 2′F SUL1 RNA pool to microvesicle coated magnetic beads” above). The negative selection can be performed using beads conjugated to the supernatant or the input samples (e.g., plasma) after microvesicles are filtered or sedimented from the sample (referred to as “no microvesicle coated beads,” “microvesicle depleted samples,” or similar). The steps are:

[0699] 1) Start with aptamer library product from the desired round after transcription as described above. Wash the beads before start: remove storage buffer, wash beads with 200 μL wash buffer, then replace buffer as stated below:

[0700] 2) Negative selection step: Add and pipet mix 20 μl of transcription product (15 mM MgCl₂) with freshly washed ‘no microvesicle’ coated beads with 10 μL 10× PBS with 1% BSA, 70 μL H₂O. No additional MgCl₂ is needed because the MgCl₂ in the diluted transcription product (TK) provides a final concentration of 3 mM MgCl₂.

[0701] 3) Incubate for 30 min at 37° C., shake at 1000 rpm.

[0702] 4) Remove supernatant and add it to the positive selection beads (directly), which are washed microvesicle coated beads.

[0703] Continue with positive selection incubation. See Binding 2′F SUL1 RNA pool to microvesicle coated magnetic beads above, starting at step 2. Additional steps through transcription are as detailed above.

### Example 12

### Additional Aptamers to Breast Cancer (BrCa) Derived Microvesicles

[0704] In this Example, an aptamer library is screened to identify aptamers that distinguish between microvesicles circulating in the blood of breast cancer patients and microvesicles circulating in the blood of healthy, control individuals (i.e., without breast cancer). The procedure used the same samples and aptamer library as in Example 10 above. The procedure in this Example differs in that negative selection was performed before each positive selection starting after the third round of positive selection.

[0705] Negative selection serves to remove aptamers that bind soluble/abundant/non-informative and common proteins for cancer and non-cancer proteins. Negative selection include performing negative selection on the aptamer candidates selected against BrCa+ microvesicles as follows: (i) using microbeads conjugated to the supernatant from the BrCa+ plasma ultracentrifugation step (which should not contain microvesicles); (ii) using microbeads conjugated to the supernatant from the BrCa− plasma ultracentrifugation step (which should not contain microvesicles); (iii) using microbeads conjugated to BrCa− microvesicles. Negative selection can also be performed on the aptamer candidates selected against BrCa− microvesicles as follows: (i) using microbeads conjugated to the supernatant from the BrCa+ plasma ultracentrifugation step (which should not contain microvesicles); (ii) using microbeads conjugated to the supernatant from the BrCa− plasma ultracentrifugation step (which should not contain microvesicles); (iii) using microbeads conjugated to BrCa+ microvesicles. Negative selection rounds are performed between rounds of positive selection as described herein.

[0706] Microvesicles were isolated from plasma of a pool of 60 breast cancer patients (BrCa+). Microvesicles were also isolated from pool of 60 non-cancer samples (BrCa−). Microvesicles were isolated from the plasma using ultracentrifugation (120,000×g). Microvesicles were in the pellet from the ultracentrifugation. The supernatant from the ultracentrifugation was saved to use as a control. The microvesicles from both sample types were conjugated to MagPlex beads (Luminex Corp, Austin Tex.).

[0707] The aptamer library used consisted of a 2′F SUL1 RNA aptamer library. The sequence is 5′-GGGAGGACGAUGCGG-N40-CAGACGACUCGCUGAGGAUCCGAGA-3′ (SEQ ID NO. 8). The aptamer library consists of three sections: Forward primer—15 nucleotides, variable region—40 nucleotides; reverse primer—25 nucleotides. All pyrimidines (C and U) were 2′Fluoro modified.

[0708] The aptamer library was incubated with either the cancer or control microvesicle-conjugated beads. Nine rounds of positive selection for aptamers that bind the microvesicles were performed in parallel for both types of samples. Negative selection against beads conjugated to the input plasma supernatant after ultracentrifugation before positive selection in rounds 4-9. See Example 11 above for detailed protocol of the positive selection and negative selection steps.

[0709] The aptamers that were retained from the above positive selection were sequenced using Next Generation sequencing technology consisting of Ion Torrent NGS (Life Technologies, Inc., Carlsbad, Calif.). The MiSeq system may be used also (Illumina, Inc., San Diego, Calif.). The sequences are compared to identify aptamers that are found in the cancer samples and not the control samples, and vice versa. Such aptamers provide candidates that can be used to distinguish between BrCa and non-BrCa samples.

[0710] The sequencing data was analyzed according to the following procedure:

[0711] Step 1: Sequences were ranked according to frequencies in entire aptamer pool recovered in round 9 after negative selection against beads conjugated to microvesicle-depleted cancer plasma followed by positive selection against beads conjugated to cancer microvesicles.

[0712] Step 2: Fold changes were calculated between noted sample in Step 1 and: (i) same sample after additional negative selection against microvesicle depleted cancer plasma; (ii) same sample after additional negative selection against non-cancer microvesicles; (iii) same sample after additional negative selection against microvesicles depleted non-cancer plasma.

[0713] Step 3: Sequences were ranked based on fold changes calculated in Step 2 to identify sequences which are abundant or deficient in aptamer pool selected for breast cancer derived microvesicles.

[0714] Step 4: Possible mutant sequences (e.g., due to PCR or other errors) were removed based on results of consolidation analysis.

[0715] Step 5: Sequences were identified with fold changes greater than 3 and minimum frequency 50 in all three variants (i, ii and iii in step 2).

[0716] The same selection schemes as in steps 1-5 were performed for aptamers selected against beads conjugated to non-cancer microvesicles.

[0717] A number of representative sequences obtained from these procedures are shown in Table 11. The sequences in the table were identified in the aptamer pools from selection against BrCa microvesicles but were not in the aptamer pools selected against non-cancer samples. In Table 11, the sequences are shown 5′ to 3′ from left to right, wherein each complete sequence consists of a 5′ leader sequence 5′-GGGAGGACGAUGCGG (SEQ ID NO. 9) followed by the indicated Variable Sequence followed by the 3′ tail sequence 5′-CAGACGACUCGCUGAGGAUCCGAGA (SEQ ID NO. 10). Each sequence is derived from a library having a leader and tail (see description above) with a variable sequence between. It is understood that the nucleotide sequences that are disclosed in Table 11 can also be modified to the extent that resulting modifications result in an aptamer having about 50, 55, 60, 65, 70, 75, 80, 85, 90, 95, 96, 97, 98, and 99 percent homology to the disclosed sequence and retain the functionality of binding to microvesicle antigens or functional fragments thereof.

TABLE 11
BrCa microvesicle aptamer candidate sequences

| ID | SEQ ID | |
|---|---|---|
| (FIG.) | NO. | Variable Sequence |
| BCE8 | 25 | UACCGCCUCAUCAUCGGACACGACGUGUAUCAGUUGGCUG |
| (FIG. 10Ai) | | |
| BCE9 | 26 | GUUCUCGCCUCUGUCCUCAUGGUUCGAACCGGUAUGCAUG |
| (FIG. 10Aii) | | |
| BCE10 | 27 | GCGGUUUCUUCUCCUGACUACAUGAGAUUAAUAAACGCGC |
| (FIG. 10Aiii) | | |
| BCE11 | 28 | CCGCCUCGAACACUGACGUCGUGGAACCUUCGAUUGCUAG |
| (FIG. 10Aiv) | | |
| BCE12 | 29 | AAUCACAGUAAUUCUGCCCCUCUGAUGAAACCGGUUACUU |
| (FIG. 10Av) | | |
| BCE13 | 30 | CUUAGUGAUUUCGCCGCCCCUCUGUUUAGUGGCCAUUGGA |
| (FIG. 10Avi) | | |
| BCE14 | 31 | ACACUAUUCCGGUAAGUCAUCGUUUAACCGUUUGUUGCAA |
| (FIG. 10Avii) | | |
| BCE15 | 32 | UGCGCAACGCCUUGAUUCACUCCUACAGUGUGUCUAUAGA |
| (FIG. 10Aviii) | | |
| BCE16 | 33 | AAUGUUAAGCUUACAUACGCCUGGGUCACUCUUUGUUCUG |
| (FIG. 10Aix) | | |
| BCE17 | 34 | GUAAAUAUUCACGUUGAAUCGCCUUGCUCCUCUUAGUCUG |
| (FIG. 10Bi) | | |
| BCE18 | 35 | CCGCCUCGGAUCGUUCCCAAUGGUGGUACCCCUAUUAAUG |
| (FIG. 10Bii) | | |
| BCE19 | 36 | UGUAGAUCGUUCUUAUCCGCCUCGGUCUUCCCCAGGUUAA |
| (FIG. 10Biii) | | |
| BCE20 | 37 | AUCGUCGGGCCCCUUUUAUGAAACUUACAUGAAAGCGCAC |
| (FIG. 10Biv) | | |
| BCE21 | 38 | UAAGAGUGCACAGUACUGCCUCGAUCCUCCAUGGCUUAAG |
| (FIG. 10Bv) | | |
| BCE22 | 39 | GAAUUAGUACUGACGGCCGCCUUGAUCCUCCGUUAGUCUG |
| (FIG. 10Bvi) | | |
| BCE23 | 40 | GCCCGCCUCCGAAGCCCUCCUAAGUGCACUUUAAACCGCG |
| (FIG. 10Bvii) | | |
| BCE24 | 41 | CCGCCUGGGAUCACUCUCUACGCGUAUAAAUGCUCUGUCA |
| (FIG. 10Bviii) | | |
| BCE25 | 42 | AGUCUGACCCUGUUAUGGACUACCAUAUCAGAAAGGUACU |
| (FIG. 10Bix) | | |
| BCE26 | 43 | GGUGAUCCUCCCCCCCGCCUCGAAGAUUUGUGCACAUAUC |
| (FIG. 10Ci) | | |
| BCE27 | 44 | GCUACCAUCGUCUAGUGAGUCACCCUUAGUUCAUCAAGGC |
| (FIG. 10Cii) | | |

[0718] Each sequence in Table 11 is synthesized in two variants for further investigation: 5′ biotinylated and 3′ biotinylated. This provides aptamer variants that can be captured at the 5′ end or the 3′ end as desired. The aptamers are further synthesized with each pyrimidine (C and U) 2′Fluoro modified. The aptamers may also be synthesized as the DNA sequence corresponding to each RNA sequence in Table 11. The aptamer libraries can also be filtered based on predicted secondary sequence, free energy, and other parameters as described herein.

[0719] FIGS. 10A-C show binding of the aptamers in Table 11 against microbeads conjugated to various input samples. The aptamer is indicated above each plot and the plot for each aptamer is indicated in the ID column in Table 11. The input sample is indicated on the X axis from left to right as follows: 1) Cancer Exosome: aptamer binding to microbeads conjugated to microvesicles isolated from plasma samples from breast cancer patients; 2) Cancer Non-exosome: aptamer binding to microbeads conjugated to plasma samples from breast cancer patients after removal of microvesicles by ultracentrifugation; 3) Non-Cancer Exosome: aptamer binding to microbeads conjugated to microvesicles isolated from plasma samples from normal (i.e., non-breast cancer) patients; 4) Non-Cancer Non-Exosome: aptamer binding to microbeads conjugated to plasma samples from breast cancer patients after removal of microvesicles by ultracentrifugation. As shown in FIGS. 10A-C, the aptamers were each able to distinguish between the cancer microvesicle samples versus the supernatant control samples and the non-cancer microvesicles. Further, all sequences in Table 11 were observed as binding more abundantly to cancer derived microvesicles as compared to non-cancer derived microvesicles with the exception of BCE10 and BCE14, which were observed as binding more abundantly to non-cancer derived microvesicles as compared to cancer derived microvesicles.

[0720] Based on the comparisons performed in this Example, aptamers that bind different starting input are obtained, including: 1) aptamers that preferentially bind cancer-derived microvesicles over non-cancer derived microvesicles; 2) aptamers that preferentially bind non-cancer-derived microvesicles over cancer derived microvesicles; 3) aptamers that bind both non-cancer-derived microvesicles and cancer derived microvesicles (e.g., “universal” binders); and 4) aptamers that bind plasma components that have been depleted of microvesicles.

[0721] The aptamer libraries in this Example are further subjected to four rounds of additional negative and positive selection. The positive selection is performed as described in this Example. The negative selection rounds are performed using the beads conjugated to non-cancer microvesicles as negative selection for aptamers obtained by positive selection against beads conjugated to cancer microvesicles. Similarly, the negative selection rounds are performed using the beads conjugated to cancer microvesicles as negative selection for aptamers obtained by positive selection against beads conjugated to non-cancer microvesicles.

### Example 13

### Disease Diagnosis

[0722] This example illustrates the use of the aptamers of the present invention to diagnose a proliferative disease.

[0723] A suitable quantity of an aptamer that binds a BrCa-derived microvesicle such as identified in Example 10 or Example 12 is synthesized via chemical means known in the art. The aptamers are conjugated to a diagnostic agent suitable for detection, such as a fluorescent moiety, using a conjugation method known in the art.

[0724] The composition is applied to microvesicles isolated from blood samples taken from a test cohort of patients suffering from a proliferative disease associated with the overexpression of microvesicles, e.g. breast cancer. The composition is likewise applied to microvesicles isolated from blood samples taken from a negative control cohort, not suffering from a proliferative disease.

[0725] The use of appropriate detection techniques (e.g., microbead assay or flow cytometry) on the test cohort samples indicates the presence of disease, while the same techniques applied to the control cohort samples indicate the absence of disease.

[0726] The results show that the aptamers of the present invention are useful in diagnosing proliferative diseases.

### Example 14

### Therapeutic Aptamers

[0727] This example illustrates the use of the aptamers of the present invention to treat a proliferative disease in a mouse.

[0728] A suitable quantity of an aptamer that binds a BrCa-derived microvesicle such as identified in Example 10 or Example 12 is synthesized via chemical means known in the art. The aptamers are conjugated to a chemotherapeutic agent, such as Doxil, using a conjugation method known in the art. The conjugate is formulated in an aqueous composition.

[0729] The composition is administered intravenously, in one or more doses, to a test cohort of mice suffering from a proliferative disease associated with the overexpression of the microvesicles, e.g. a breast cancer model. A control cohort, not suffering from a proliferative disease is administered the identical composition intravenously, according to a corresponding dosage regimen.

[0730] Pathological analysis of tumor samples and/or mouse survival indicates that mortality and/or morbidity are improved in the test cohort over the control cohort.

[0731] The results show that the aptamers of the present invention are useful in treating proliferative diseases.

[0732] Useful aptamers can be used to treat breast cancer in other organisms, e.g., a human.

### Example 15

### Oligonucleotide—Sequencing Detection Method

[0733] This example illustrates the use of an oligonucleotide pool to detect microvesicles that are indicative of a phenotype of interest. The method makes use of a pool of oligonucleotides that have been enriched against a target of interest that is indicative of a phenotype of interest. The method in this Example allows efficient use of a library of oligonucleotides to preferentially recognize a target entity.

[0734] For purposes of illustration, the method is described in the Example with a microvesicle target from a bodily fluid sample. One of skill will appreciate that the method can be extended to other types of target entity (e.g., cells, proteins, various other biological complexes), sample (e.g., tissue, cell culture, biopsy, other bodily fluids) and other phenotypes (other cancers, other diseases, etc) by enriching an aptamer library against the desired input samples.

[0735] General Workflow:

[0736] 1) Obtain sample (plasma, serum, urine or any other biological sample) of patients with unknown medical etymology and pre-treating them accordingly to ensure availability of the target of interest (see below). Where the target of interest is a microvesicle population, the microvesicles can be isolated and optionally tethered to a solid support such as a microbead.

[0737] 2) Expose pre-treated sample to an oligonucleotide pool carrying certain specificity against target of interest. As described herein, an oligonucleotide pool carrying certain specificity against the target of interest can be enriched using various selection schemes, e.g., using non-cancer microvesicles for negative selection and cancer microvesicles for positive selection as described above. DNA or RNA oligonucleotides can be used as desired.

[0738] 3) Contact oligonucleotide library with the sample.

[0739] 4) Elute any oligonucleotides bound to the target.

[0740] 5) Sequence the eluted oligonucleotides. Next generation sequencing methods can be used.

[0741] 6) Analyze oligonucleotide profile from the sequencing. A profile of oligonucleotides known to bind the target of interest indicates the presence of the target within the input sample. The profile can be used to characterize the sample, e.g., as cancer or non-cancer.

[0742] Protocol Variations:

[0743] Various configurations of the assay can be performed. Four exemplary protocols are presented for the purposes of the oligonucleotide-sequencing assay. Samples can be any appropriate biological sample. The protocols can be modified as desired. For example, the microvesicles can be isolated using alternate techniques instead or or in addition to ultracentrifugation. Such techniques can be disclosed herein, e.g., polymer precipitation (e.g., PEG), column chromatography, and/or affinity isolation.

[0744] Protocol 1:

[0745] Ultracentrifugation of 1-5 ml bodily fluid samples (e.g., plasma/serum/urine) (120K×g, no sucrose) with two washes of the precipitate to isolate microvesicles.

[0746] Measure total protein concentration of recovered sample containing the isolated microvesicles.

[0747] Conjugate the isolated microvesicles to magnetic beads (for example MagPlex beads (Luminex Corp. Austin Tex.)).

[0748] Incubate conjugated microvesicles with oligonucleotide pool of interest.

[0749] Wash unbound oligonucleotides by retaining beads using magnet.

[0750] Elute oligonucleotides bound to the microvesicles.

[0751] Amplify and purify the eluted oligonucleotides.

[0752] Oligonucleotide sequencing (for example, Next generation methods; Ion Torrent: fusion PCR, emulsion PCR, sequencing).

[0753] Assess oligonucleotide profile.

[0754] Protocol 2:

[0755] This alternate protocol does not include a microvesicle isolation step, microvesicles conjugation to the beads, or separate partitioning step. This may present non-specific binding of the oligonucleotides against the input sample.

[0756] Remove cells/debris from bodily fluid sample and dilute sample with PBS containing MgCl₂ (2 mM).

[0757] Pre-mix sample prepared above with oligonucleotide library.

[0758] Ultracentrifugation of oligonucleotide/sample mixture (120K×g, no sucrose). Wash precipitated microvesicles.

[0759] Recover precipitate and elute oligonucleotides bound to microvesicles.

[0760] Amplify and purify the eluted oligonucleotides.

[0761] Oligonucleotide sequencing (for example, Next generation methods; Ion Torrent: fusion PCR, emulsion PCR, sequencing).

[0762] Assess oligonucleotide profile.

[0763] Protocol 3:

[0764] This protocol uses filtration instead of ultracentrifugation and should require less time and sample volume.

[0765] Remove cells/debris from bodily fluid sample and dilute it with PBS containing MgCl₂ (2 mM).

[0766] Pre-mix sample prepared above with oligonucleotide library.

[0767] Load sample into filter (i.e., 150K or 300K MWCO filter or any other that can eliminate unbound or unwanted oligonucleotides). Centrifuge sample to concentrate. Concentrated sample should contain microvesicles.

[0768] Wash concentrate. Variant 1: Dilute concentrate with buffer specified above to the original volume and repeat centrifugation. Variant 2: Dilute concentrate with buffer specified above to the original volume and transfer concentrate to new filter unit and centrifuge. Repeat twice.

[0769] Recover concentrate and elute oligonucleotides bound to microvesicles.

[0770] Amplify and purify the eluted oligonucleotides.

[0771] Oligonucleotide sequencing (for example, Next generation methods; Ion Torrent: fusion PCR, emulsion PCR, sequencing).

[0772] Assess oligonucleotide profile.

[0773] Protocol 4:

[0774] Ultracentrifugation of 1-5 ml bodily fluid sample (120K×g, no sucrose) with 2 washes of the precipitate to isolate microvesicles.

[0775] Pre-mix microvesicles with oligonucleotide pool.

[0776] Load sample into 300K MWCO filter unite and centrifuge (2000×g). Concentration rate is ˜3×.

[0777] Wash concentrate. Variant 1: Dilute concentrate with buffer specified above to the original volume and centrifuge. Repeat twice. Variant 2: Dilute concentrate with buffer specified above to the original volume and transfer concentrate to new filter unit and centrifuge. Repeat twice

[0778] Recover concentrate and elute oligonucleotides bound to microvesicles.

[0779] Amplify and purify the eluted oligonucleotides.

[0780] Oligonucleotide sequencing (for example, Next generation methods; Ion Torrent: fusion PCR, emulsion PCR, sequencing).

[0781] Assess oligonucleotide profile.

[0782] In alterations of the above protocols, polymer precipitation is used to isolate microvesicles from the patient samples. For example, the oligonucleotides are added to the sample and then PEG4000 or PEG8000 at 4% or 8% concentration is used to precipitate and thereby isolate microvesicles. Elution, recovery and sequence analysis continues as above.

### Example 16

### Plasma/Serum Probing with Oligonucleotide Probe Library

[0783] The following protocol is used to probe a plasma or serum sample using an oligonucleotide probe library.

[0784] Input Oligonucleotide Library:

[0785] Use 2 ng input of oligonucleotide library per sample.

[0786] Input oligonucleotide library is a mixture of two libraries, cancer and non-cancer enriched, concentration is 16.3 ng/ul.

[0787] Dilute to 0.2 ng/ul working stock using Aptamer Buffer (3 mM MgCl₂ in 1× PBS)

[0788] Add 10 ul from working stock (equal to 2 ng library) to each optiseal tube

[0789] Materials:

[0790] PBS, Hyclone SH30256.01, LN: AYG165629, bottle#8237, exp. June 2015

[0791] Round Bottom Centrifuge Tubes, Beckman 326820, LN:P91207

[0792] OptiSeal Centrifuge tubes and plugs, polyallomer Konical, Beckman 361621, lot#Z10804SCA

[0793] Ultracentrifuge rotor: 50.4 TI

[0794] Ultracentrifuge rotor: 50.4 TI, Beckman Caris ID#0478

[0795] Protocol:

[0796] 1 Pre-chill tabletop centrifuge, ultracentrifuge, buckets, and rotor at 4° C.

[0797] 2 Thaw plasma or serum samples

[0798] 3 Dilute 1 ml of samples with 1:2 with Aptamer Buffer (3 mM MgCl₂ in 1× PBS)

[0799] 4 Spin at 2000×g, 30 min, 4° C. to remove debris (tabletop centrifuge)

[0800] 5 Transfer supernatants for all samples to a round bottom conical

[0801] 6 Spin at 12,000×g, 45 min, 4° C. in ultracentrifuge to remove additional debris.

[0802] 7 Transfer supernatant about 1.8 ml for all samples into new OptiSeal bell top tubes (uniquely marked).

[0803] 8 Add 2 ng (in 10 ul) of DNA Probing library to each optiseal tube

[0804] 9 QS to 4.5 ml with Aptamer Buffer

[0805] 10 Fix caps onto the OptiSeal bell top tubes

[0806] 11 Apply Parafilm around caps to prevent leakage

[0807] 12 Incubate plasma and oligonucleotide probe library for 1 hour at room temperature with rotation

[0808] 13 Remove parafilm (but not caps)

[0809] 14 Place correct spacer on top of each plugged tube

[0810] 15 Mark pellet area on the tubes, insure this marking is facing outwards from center.

[0811] 16 Spin tubes at 120,000×g, 2 hr, 4° C. (inner row, 33,400 rpm) to pellet microvesicles.

[0812] 17 Check marking is still pointed away from center.

[0813] 18 Completely remove supernatant from pellet, by collecting liquid from opposite side of pellet marker and using a 10 ml syringe barrel and 21G2 needle

[0814] 19 Discard supernatant in appropriate biohazard waste container

[0815] 20 Add 1 ml of 3 mM MgCl2 diluted with 1× PBS

[0816] 21 Gentle vortex, 1600 rpm for 5 sec and incubate 5 min at RT.

[0817] 22 QS to ˜4.5 mL with 3 mM Mg Cl2 diluted with 1× PBS

[0818] 23 Fix caps onto the OptiSeal bell top tubes.

[0819] 24 Place correct spacer on top of each plugged tube.

[0820] 25 Mark pellet area on the tubes, insure this marking is facing outwards from center.

[0821] 26 Spin tubes at 120,000×g, 70 min, 4° C. (inner row 33,400 rpm) to pellet microvesicles

[0822] 27 Check marking in still pointed away from center.

[0823] 28 Completely remove supernatant from pellet, by collecting liquid from opposite side of pellet marker and using a 10 ml syringe barrel and 21G2 needle

[0824] 29 Discard supernatant in appropriate biohazard waste container

[0825] 30 Add 1 ml of 3 mM MgCl2 diluted with 1× PBS

[0826] 31 Gentle vortex, 1600 rpm for 5 sec and incubate 5 min at RT.

[0827] 32 QS to ˜4.5 mL with 3 mM Mg Cl2 diluted with 1× PBS

[0828] 33 Fix caps onto the OptiSeal bell top tubes.

[0829] 34 Place correct spacer on top of each plugged tube.

[0830] 35 Mark pellet area on the tubes, insure this marking is facing outwards from center.

[0831] 36 Spin tubes at 120,000×g, 70 min, 4° C. (inner row 33,400 rpm) to pellet microvesicles

[0832] 37 Check marking is still pointed away from center.

[0833] 38 Save an aliquot of the supernatant (100 ul into a 1.5 ml tube)

[0834] 39 Completely remove supernatant from pellet, by collecting liquid from opposite side of pellet marker and using a 10 ml syringe barrel and 21G2 needle

[0835] 40 Add 50 ul of Rnase-free water to the side of the pellet

[0836] 41 Leave for 15 min incubation on bench top

[0837] 42 Cut top off tubes using clean scissors.

[0838] 43 Resuspend pellet, pipette up and down on the pellet side

[0839] 44 Measure the volume, make a note on the volume in order to normalize all samples

[0840] 45 Transfer the measured resuspended eluted microvesicles with bound oligonucleotides to a Rnase free 1.5 ml Eppendorf tube

[0841] 46 Normalize all samples to 100 μl to keep it even across samples and between experiments.

[0842] Next Generation Sequencing Sample Preparation:

[0843] I) Use 50 ul of sample from above, resuspended in 100 ul H2O and containing microvesicle/oligo complexes, as template in Transposon PCR, 14 cycles.

[0844] II) AMPure transposon PCR product, use entire recovery for indexing PCR, 10 cycles.

[0845] III) Check indexing PCR product on gel, proceed with AMPure if band is visible. Add 3 cylces if band is invisible, check on gel. After purification quantify product with QuBit and proceed with denaturing and dilting for loading on HiSeq flow cell (Illumina Inc., San Diego, Calif.).

[0846] IV) 5 samples will be multiplexed per one flow cell. 10 samples per HiSeq.

### Example 17

### Enrichment of Oligonucleotides to Breast Cancer (BrCa) and Non-BrCa Derived Microvesicles

[0847] In this Example, an aptamer library is screened to enrich aptamers that identify microvesicles circulating in the blood of breast cancer patients and microvesicles circulating in the blood of healthy, control individuals (i.e., without breast cancer). The procedure was similar to that in Examples 10 and 12 above. The procedure in this Example used the 9-round selection scheme shown in FIG. 11A.

[0848] In FIGS. 11A-11B, the following abreviations are used: CE—Cancer exosome samples; NCE—Non-cancer exosome samples; CNE—Cancer no exosome samples; NCNE—Non-cancer no exosome samples; MFI—Median Fluorescence Intensity; GC—GC content group analysis; Heat—heat elution; NaOH—sodium hydroxide elution. The terms exosome and microvesicle are used interchangeably.

[0849] As indicated in FIG. 11A, 0.1 mg/mL salmon sperm DNA was added as a competitor in selection rounds 7-9. FIG. 11B shows the enrichment of aptamers that bind to microvesicles (CE and NCE). Binding was determined by fluorescently labeling aptamer candidates and detecting binding to bead-capture microvesicles using a microbead assay format. At the end of round 9, only aptamers having GC content between ˜30% and 70% were selected to generate panels to diffentiate cancer and non-cancer samples. In addition, several groups of aptamers were selected using the following criteria: 1) 12 most commonly observed; 2) 12 most commonly observed having >2-fold change in binding observed between cancer and normal samples; 3) 30 most commonly observed having >2-fold change in binding observed between cancer and normal samples, >10 read counts in the library determined by high throughput sequencing, heat elution after selection round 9; and 4) 30 most commonly observed having >2-fold change in binding observed between cancer and normal samples, >10 read counts in the library determined by high throughput sequencing, NaOH elution after selection round 9.

[0850] Retained sequences are shown in Table 12 with selection criteria 1-4 indicated. In Table 12, the sequences are shown 5′ to 3′ from left to right, wherein each complete sequence consists of a 5′ leader sequence 5′-GCTGTGTGACTCCTGCAA (SEQ ID NO. 47) followed by the indicated Variable Sequence followed by the 3′ tail sequence 5′-GCAGCTGTATCTTGTCTCC (SEQ ID NO. 48).

TABLE 12
BrCa microvesicle aptamer sequences

| SEQ ID | Selection | |
|---|---|---|
| NO. | Criteria | Variable Sequence |
| 49 | 3 | GTCCGCTTGGGGGTGGGTATCGAAAATTCGCGTTCTGGGGCGG |
| 50 | 3 | CTTCGCTCGTTTCAATGTTCAGTTCTGGTCTTTAGGTCTTTAG |
| 51 | 3 | TAGGAGGATAATATGTATCCGGTGCATCGGCCTGACTTTCCCC |
| 52 | 3 | TAGGAGGGCTGAAAACTTGCTTCTTCCCGGTGCAGTTATAACA |
| 53 | 3 | TAGGAGGATAATATGTATCCGATGCATGGGCCCGACTTTCCCC |
| 54 | 3 | TGCGTTTTCCTTGGGGTTCAGGGTAGGATGGGGGTGGAGGTGG |
| 55 | 3 | GGGGGGCGGGTGGGCTGGTAAAAGGTGATGCGGGGGTATTGTT |
| 56 | 3 | TAGGAGGATAATATGTATCCGGTGCATCGGCCCAACTTTCCCC |
| 57 | 3 | CCAATCTCGGAAGGTTTAAATAAGGTGGTCTTTAGGTCTTTAG |
| 58 | 3 | TACGTTAAGTGGGTCGGGAGGGGGGAATAGGGGGTTTGGTTGG |
| 59 | 3 | GTGAGGTCGGTGGGGCGGGGGATGGTGGGGGGTCGTTTACATT |
| 60 | 3 | CGATATTGGGGGGGGGTTGGCGGGCTATTTTCCGGGTGGGTG |
| 61 | 3 | TCGGTTCCTGTTAATTCGCTGGTGGTTGGTGGGGTGGCGGATG |
| 62 | 3 | GCGGGGAGGTGGGGGTGGGTGGAGGGTTGGTTACTCTCTACT |
| 63 | 3 | CGGGAATGGGAGGGTGGGGGTGGTGGCCGGGTCGTGTTATACC |
| 64 | 3 | TAGGAGGATAATATGTATCCGGTGCATCGGTCCGACTTTCCCC |
| 65 | 3 | TATAGTTGGGCGTAGGCGGGGGGGGGTGGTTGGGAGGTCCAAG |
| 66 | 3 | TAGGAGGATAATATGTATCCGGTGCATCGGCCCGACCTTCCCC |
| 67 | 3 | TCGATCGTCCTCAGGATCTCGTGGTTCAAATCATAAAGATTAT |
| 68 | 3 | TGCTGTCTGGGCGGGGGCGGTCTTGTGGTTTCTTTGGGGGGGG |
| 69 | 3 | GCGAGACAGGAGGGTGGTCTTATACGTGGGGGGGGGTGGTTGG |
| 70 | 3 | TAGGAGGGCTGAAGACTTGCTTCTTCCCGGTGCAGTTATAACA |
| 71 | 3 | CGTGTGGGGGGTGGGTTGGGCTCGGGTTGTTATCAGTTCCATG |
| 72 | 3 | CGATATTGGGGGGGGGGTTGGCGGGCTATTTTCCGGGTGGGTG |
| 73 | 3 | TAGGAGGATAATATGTATCCGGTGCATCGGCCCGACTTTCCTC |
| 74 | 3 | TAGGAGGATAATATGTATCCGGTGCATCGGCTCGACTTTCCCC |
| 75 | 3 | CTTCGCTCGTTTCAATGTTTAGTTCTGGTCTTTAGGTCTTTAG |
| 76 | 3 | GGACATGGGTTGGGTCGGGAGGGGGTGGTCGGTTGGGCAGTAA |
| 77 | 3 | TAGGAGGATAATATGTATACGATGCATCGGCCCGACTTTCCCC |
| 78 | 3 | TAGGAGGATAATATGTATCAGATGCATCGGCCCGACTTTCCCC |
| 79 | 4 | TGGATGTATGGGGTCTCGGGGTGGGAGGGTTCAACTTATCTGG |
| 80 | 4 | GTCCGCTTGGGGGTGGGTATCGAAAATTCGCGTTCTGGGGCGG |
| 81 | 4 | TCTTGTACAAATAGGAGGGAAGGGGGTTTTGGGAGGTGGGTGG |
| 82 | 4 | CTTCGCTCGTTTCAATGTTCAGTTCTGGTCTTTAGGTCTTTAG |
| 83 | 4 | CTGATGTTAGTAGGTCGGGGTCCGGTTGGGGGTTGGGTTGAGG |
| 84 | 4 | TGGCTCGTGGACGTGGTGGTGGCGGGTCGTGGGGGTGGGTAGG |
| 85 | 4 | TAGGAGGATAATATGTATCCGATGCATCGGCACGACTTTCCCC |
| 86 | 4 | CGGGGAGGGGGGGTCGGGGTATTTATTGTGTATGTTTTTTGTG |
| 87 | 4 | TGACTGTATCTTGGGGCGGGTTCTGGGGGGGGTGTATTGTTCA |
| 88 | 4 | TAGGAGGATAATATGTATCCGATGCATCGGCCCGACTTTCACC |
| 89 | 4 | TCATGTCTAGGGGGGGGAAGTCGGTTTGGGTGGGTACTCTGTG |
| 90 | 4 | CTTGTTTCGCTTTGGGTTTGGGCGGGTGGGTCAATTCCTGTTG |
| 91 | 4 | GGTGGGGGCCCTCGGTACTGTGGCGGGGTGGGTGGGTTTAGTG |
| 92 | 4 | TGCGTTTTCCTTGGGGTTCAGGGTAGGATGGGGGTGGAGGTGG |
| 93 | 4 | TGGTGGGGTGGGTCTGTGGGGTGGTTTTGTTCTTATCGGGGTT |
| 94 | 4 | TGGGTGGGTTACGGGTGGGTGTTGTTATCGCGCTGATCTGGTT |
| 95 | 4 | CGTGACGGTTTTAATCAGGGGGGGGACTCTAACATTTGGGTGG |
| 96 | 4 | TGCTCATATCGTGGGGGGATGGGGTTGCTAGTGGATGGGGTGG |
| 97 | 4 | GGGGGGCGGGTGGGCTGGTAAAAGGTGATGCGGGGGTATTGTT |
| 98 | 4 | TGATGTGGGGGGTGGGGTATAATACTTATGTTTGGGGTTTGGG |
| 99 | 4 | TTGGGTGGGTGGGAATGGGTATTTTTTCTTCGGGCGATGTTTG |
| 100 | 4 | TAGTTGGATACTGGATTTGGGAGGGATGGGGGGAGGAGGGTGG |
| 101 | 4 | CTGGAAGGTTGGGTGTGGGGCGGGGGGGAGGTCTCTCTATGT |
| 102 | 4 | TACGTTAAGTGGGTCGGGAGGGGGGAATAGGGGGTTTGGTTGG |
| 103 | 4 | TGCCGTGGGCCGGGGAGGGTGGGTTGGCGTCTCTGTTTCGATA |
| 104 | 4 | GGGGGGGCGGCCGGGGTGGACTGTGGCCCGTCTTCGTATTGTT |
| 105 | 4 | TGGTGGTGGCTGGGGGACGGGTATCCTGGAATTAGGGGTGGG |
| 106 | 4 | TCGGTTCATGTTGGGTGGGATCGGGGCGGGGTTTCTTCTCCTG |
| 107 | 4 | TAGGAGGATAATATGTATACGATGCATCGGCCCGACTTTCCCC |
| 108 | 4 | TCGTGGGTGTGTTCTGGGGGGCGTGGACGGGGGTTAATGGGCA |
| 109 | 1 | TAGGAGGATAATATGTATCCGATGCATCGGCCCGACTTTCCCC |
| 110 | 1 | TAAGAGTCTTAGGATGACGTCATTCGTCCGTCACGGTGCGGGA |
| 111 | 1 | GCCTGGCCAGATAGCAGTTACCTTACGGGATCTATATTCACCG |
| 112 | 1 | TGGCTCGTGGACGTGGTGGTGGCGGGTCGTGGGGGTGGGTAGG |
| 113 | 1 | TTCGTGTTCATCTGTTTATTGTTATTCACAATCCGTCTTTTGT |
| 114 | 1 | CGAATCCGTCGACCGCCCTCGTAACCATCCAACCCAGTCTCCT |
| 115 | 1 | CAGGAAAGTTACTTATCTTTTAGACGGTTATGTTCTCATTACT |
| 116 | 1 | ATCTGCTCGATACGTAGATAGTCTGCTCGATACAAAAGGGTGG |
| 117 | 1 | CGATGAGCGGGCTCCGATATTGTGTCGGCGTGACTACCTTGAT |
| 118 | 1 | GGTCGGCCTATTTATTGCGGCACGTTGTTTCTTGATGTCGCCC |
| 119 | 1 | TCGAATTCAGTTCTACATGTGTATTTCTTGCTCCGTTTCAGAA |
| 120 | 1 | TCGGTCCGGCAACAAACCCCACGCGCCTTCGATATGCCTGTCG |
| 121 | 2 | CCAATCTCGGAAGGTTTAAATAAGGTGGTCTTTAGGTCTTTAG |
| 122 | 2 | CGATATTGGGGGGGGGGTTGGCGGGCTATTTTCCGGGTGGGTG |
| 123 | 2 | CGGGAATGGGAGGGTGGGGGTGGTGGCCGGGTCGTGTTATACC |
| 124 | 2 | CGTGGTGGGTTCTTGGGTGGGGGGGGAGGGTTGGCGTAGTATA |
| 125 | 2 | GTGAGGTCGGTGGGGCGGGGGATGGTGGGGGGTCGTTTACATT |
| 126 | 2 | TACGTTAAGTGGGTCGGGAGGGGGGAATAGGGGGTTTGGTTGG |
| 127 | 2 | TAGGAGGATAATATGTATCCGGTGCATCGGCCCAACTTTCCCC |
| 128 | 2 | TAGGAGGGCTGAAAACTTGCTTCTTCCCGGTGCAGTTATAACA |
| 129 | 2 | TCGGTTCCTGTTAATTCGCTGGTGGTTGGTGGGGTGGCGGATG |
| 130 | 2 | TGCTGTCTGGGCGGGGGCGGTCTTGTGGTTTCTTTGGGGGGGG |
| 131 | 2 | AACATGGGGTTCTGATAAACCTGTGCCAAATACATTGTTGAGT |
| 132 | 2 | ATTCCTCCTTTGTAAGGGATGATATCCAACTCCTCTGCGTTCG |

[0851] Individual aptamer candidates in Table 12 are synthesized. The aptamers are labeled with a fluorescent label and used to detect binding to bead-capture microvesicles using a microbead assay format. The microbead results are used to identify aptamers and panels of aptamers that differentiate cancer and non-cancer plasma samples.

### Example 18

### Aptamer Based Precipitation of Microvesicles in Plasma

[0852] Aptamers can specifically recognize target proteins with nanomolar affinity and have some potential advantages compared to antibodies due to their chemical stability, ease of synthesis and overall reproducibility. Microvesicles were isolated from a rat glioma cell line model that expresses or does not express the human EGFR protein in order to optimize aptamer-microvesicle complex formation and isolation in plasma. Microvesicles spiked into human plasma were precipitated with the positive EGFR DNA or RNA aptamer but not with a reverse complement control sequence. There was no observed binding of the positive or negative aptamer to microvesicles that do not express EGFR. Binding of aptamers to microvesicles was confirmed with aptamer based ELISAs, EMSA assays, and flow cytometry. These results demonstrate aptamer-based precipitation of microvesicles from a complex biological sample.

### Example 19

### Quantitative Proteomics of EGFR, EGFRviii, and EGFR Negative Microvesicles from a Rat Glioma Cell Line

[0853] In this Example, we performed quantitative proteomics on microvesicles isolated from a rat glioma cell line F98 (parental line), F98(EGFR) and F98(EGFRviii). Different lots of microvesicles purified from each cell line type were considered biological replicates and each biological replicate was analyzed in four technical replicates by tandem mass tag 6-plex (TMT) peptide labeling and LC-MS/MS. The general microvesicle markers CD81, CD9, CD63, Tsg101, and Alix were identified in all technical replicates. Multiple proteins were found to be up or down-regulated including a 7.5-fold increase in EGFR and a 2.6-fold increase in the EGFR binding partner HMCN2 in the F98[EGFR] compared with the parental line. These results indicate that expression of a single biomarker may affect global proteomic changes in microvesicles.

### Example 20

### Oligonucleotide Probe Library

[0854] This Example presents further development of the oligonucleotide probe library to detect biological entities such as described in Example 16 above. In this Example, steps were taken to reduce the presence of double stranded oligonucleotides (dsDNA) when probing the patient samples. The data were also generated comparing the effects of 8% and 6% PEG used to precipitate microvesicles (and potentially other biological entities) from the patient samples.

[0855] Protocol:

[0856] 1) Pre-chill tabletop centrifuge at 4° C.

[0857] 2) Protease inhibition: dissolve 2 tablets of “cOmplete ULTRA MINI EDTA-free EASYpack” protease inhibitor in 1100 ul of H₂O (20× stock of protease inhibitor).

[0858] 3) Add 50 ul of protease inhibitor to the sample (on top of frozen plasma) and start thawing: 1 ml total ea.

[0859] 4) To remove cells/debris, spin samples at 10,000×g, 20 min, 4° C. Collect 1 ml supernatant (SN).

[0860] 5) Mix 1 ml supernatant from step 4 with 1 ml of 2× PBS 6 mM MgCl₃, collect 400 ul into 3 tubes (replicates A, B, C) and use it in step 6.

[0861] 6) Add competitor per Table 13: make dilutions in 1× PBS, 3 mM MgCl₂, mix well, pour into trough, pipet using multichannel.

TABLE 13
Competitors

| | | | | | Volume | | | |
|---|---|---|---|---|---|---|---|---|
| | | | | | from stock to | Buffer to | | |
| | | | Intermediate | Number | make | make | Final | |
| | Type of | Stock | stock | of | intermediate | intermediate | Volume, | Final |
| units | Competitor | Concentration | concentration | samples | stock, ul | stock | ul | Concentration |
| ng/ul | Salmon | — | 40 | — | — | — | 425.5 | 0.8 |
| | DNA | | | | | | | |
| ng/ul | tRNA | — | 40 | — | — | — | 425.5 | 0.8 |
| x | S1 | 20 | 0.5 | 280 | 65.5 | 2555.6 | 425.5 | 0.01 |

[0862] 7) Incubate for 10 min, RT, end-over-end rotation

[0863] Pool of 6-3S and 8-3S oligonucleotide probing libraries is ready: 2.76 ng/ul (˜185 ng). Save pool stock and dilutions. New pool can be made by mixing 171.2 ul (500 mg) of library 6-3S (2.92 ng/ul) with 190.8 ul (500 ng) of library 8-3S (2.62 ng/ul). Aliquot pooled library into 30 ul and store at −80 C.

[0864] Add ssDNA oligonucleotide probing library to the final concentration 2.5 pg/ul for binding. Make dilutions in 1× PBS, 3 mM MgCl₂.

TABLE 14
Probe library calculations

| | | | ul from | | | | Volume | |
|---|---|---|---|---|---|---|---|---|
| | | Required | original | ul of | | | per sample | |
| Original | | working | stock to | buffer to | Final | | from | Final |
| stock, | | stock | make | make | volume, | Number of | working | concentration |
| ng/ul | Lib Name | (ng/ul) | working | working | ul | samples | stock | (pg/ul) |
| 2.76 | Pooled | 0.1 | 26.1 | 694.1 | 720.2 | 60 | 10.9 | 2.5 |
| | library | | | | | | | |
| | 6-3S/8-3S | | | | | | | |

[0865] 8) Binding: Incubate for 1 h at RT with rotation.

[0866] 9) Prepare polymer solution: 20% PEG8000 in 1× PBS 3 mM MgCl2 (dilute 40% PEG8000 with 2× PBS with 6 mM MgCl2). Add 20% PEG8000 to sample to the final concentration 6%. Invert few times to mix, incubate for 15 min at 4 C

TABLE 15
PEG calculations

| | | | | | | Sample | | |
|---|---|---|---|---|---|---|---|---|
| | | | | | Volume of | volume | | |
| | PEG | Final | Final | Volume | buffer to | before | | Total 20% |
| PEG | stock, | conc., | volume, | 20% PEG | adjust final | adding | Total | PEG |
| MW | % | % | ul | to add, ul | volume, ul | PEG | samples | needed, ml |
| 8000 | 20 | 6 | 622.8 | 186.9 | −0.4 | 436.4 | 60 | 11.2 |

[0867] 10) Spin at 10,000×g for 5 min, RT.

[0868] 11) Remove SN, add 1 ml 1× PBS, 3 mM MgCl2 and wash pellet by gentle invertion with 1 ml aptamer buffer.

[0869] 12) Remove buffer, Re-suspend pellets in 100 ul H2O: incubate at RT for 10 min on mixmate 900 rpm to re-suspend.

[0870] 13) Make sure each sample is re-suspended by pipeting after step 13. Make notes on hardly re-suspendable samples.

[0871] 14) 50 ul of re-suspended sample to indexing PCR→next generation sequencing (NGS).

[0872] 15) Keep leftover at 4 C

[0873] Technical Validation:

[0874] The current protocol was tested versus a protocol using 8% PEG8000 to precipitate microvesicles. The current protocol further comprises steps to reduce dsDNA in the oligonucleotide probing libraries.

[0875] FIG. 12A shows the within sample variance (black) between binding replicates and the between sample variance (grey). Black is on top of grey, thus any observable grey oligo is informative about differences in the biology of two paitent samples. This evaluation of Sources of Variance shows that the technical variances is significantly smaller than the biological variance.

[0876] FIG. 12B shows the impact of using a higher proportion of single stranded DNA and PEG 6% isolation (white bars) compared to when there is a higher amount of double stranded DNA and 8% PEG (grey). This data indicates that the protocol in this Example improves biological separation between patients.

[0877] The plots in FIG. 12C show the difference between the old protocol (PEG 8% with increased dsDNA) and the new protocol (PEG 6% no dsDNA). The black is the scatter between replicates (independent binding events) and the grey is the difference between patients. This data shows that the signal to noise increased significantly using the newer protocol.

[0878] Patient Testing:

[0879] The protocol above was used to test patient samples having the characteristics in Table 16:

TABLE 16
Patient characteristics

| Sample Type | Description |
|---|---|
| Cancer | Mixed type carcinoma; Malignant; |
| Cancer | Invasive, predominant intraductal component (8500/3) |
| Cancer | Fibrocystic Changes; Invasive lobular carcinoma - 8520/3; Lobular carcinoma in |
| | situ - 8520/2; Benign; In situ and grade 3 intraepith; Malignant; Fat necrosis, |
| | periductal inflammation, malignant cellsFat necrosis; Inflammation; Benign; |
| Cancer | Invasive, predominant intraductal component (8500/3) |
| Cancer | Mucinous (colloid) adenocarcinoma (8480/3) |
| Cancer | Invasive lobular carcinoma - 8520/3; Microcalcifications; Benign; Malignant; |
| Cancer | Otherfibrocystic changeInvasive, NOS (8500/3) |
| Cancer | Invasive ductal carcinoma, not otherwise specified (NOS) - 8500/3; Malignant; |
| Cancer | Invasive ductal carcinoma, not otherwise specified (NOS) - 8500/3; Malignant; |
| Cancer | Intraductal carcinoma, non-infiltrating, NOS (in situ) (8500/2) |
| Cancer | Atypical lobular hyperplasia |
| | Otherfibrocystic changes, inter and intralobular fibrosis, apocrine metaplasia, |
| | columnar cell change, microcalcificationsInvasive, NOS (8500/3) |
| Cancer | FibroadenomaInvasive, NOS (8500/3) |
| Cancer | Ductal carcinoma in situ - 8500/2; Invasive ductal carcinoma, not otherwise |
| | specified (NOS) - 8500/3; Microcalcifications; Benign; In situ and grade 3 |
| | intraepith; Malignant; |
| Cancer | Ductal carcinoma in situ - 8500/2; Invasive lobular carcinoma - 8520/3; Lobular |
| | carcinoma in situ - 8520/2; In situ and grade 3 intraepith; Malignant; |
| Cancer | Ductal carcinoma in situ - 8500/2; Invasive ductal carcinoma, not otherwise |
| | specified (NOS) - 8500/3; Microcalcifications; Benign; In situ and grade 3 |
| | intraepith; Malignant; Focal Micropapillary Features, invasive ductal carcinoma |
| | with micropapillary features, invasive ductal carcinoma with mucinous and |
| | micropapillary featInvasive ductal carcinoma with micropapillary and mucinous |
| | features; Invasive micropapillary carcinoma - 8507/3; Malignant; |
| Cancer | Invasive, predominant intraductal component (8500/3) |
| Cancer | Invasive ductal carcinoma, not otherwise specified (NOS) - 8500/3; Malignant; |
| Cancer | Invasive, NOS (8500/3) |
| Cancer | Infiltrating duct and lobular carcinoma (8522/3) |
| Cancer | Invasive, predominant in situ component (8520/3) |
| Non-Cancer | Otherusual ductal hyperplasia, apocrine metaplasia, microcysts, elastosis |
| Non-Cancer | Otherstromal fibrosis, fibrous cyst wall |
| Non-Cancer | Otherfibrocystic change, stromal fibrosis, cyst formation, microcalcifications, |
| | apocrine metaplasia, sclerosing adenosis, usual ductal hyperplasia |
| Non-Cancer | Otherfibrocystic changes, apocrine metaplasia, cystic change, usual ductal |
| | hyperplasia |
| Non-Cancer | Otherfibrocystic change, microcalcifications |
| Non-Cancer | Fibroadenoma |
| Non-Cancer | Otherintraductal papilloma, sclerosis, microcalcifications, stromal fibrosis |
| Non-Cancer | Fibroadenoma |
| Non-Cancer | Otherfat necrosis |
| Non-Cancer | Otherstromal fibrosis, microcalcifications |
| Non-Cancer | Otherfibrocystic change, microcystic change, focal secretory features |
| Non-Cancer | Otherstromal fibrosis |
| Non-Cancer | Fibroadenoma Otheradenosis, columnar cell change/hyperplasia, usual ductal |
| | hyperplasia |
| Non-Cancer | OtherFNA - insufficient material for diagnosis |
| Non-Cancer | Otherintraductal papilloma |
| Non-Cancer | Otherfibrocystic changes, duct ectasia, usual ductal hyperplasia, apocrine |
| | metaplasia, microcalcifications |

[0880] Microvesicles (and potentially other biological entities) were precipitated in blood (plasma) samples from the above patients using polymer precipitation with PEG as indicated above. The protocol was used to probe the samples with the oligonucleotide probe libraries. Sequences that bound the PEG precipitated samples were identified using next generation sequencing (NGS).

[0881] FIG. 12D shows scatter plots of a selection of results from testing the 40 patients listed previously. The spread in the data indicates that large numbers of oligos were detected that differed between samples. The number of significant oligos found is much greater than would be expected randomly as shown in Table 17. The table shows the number of oligonucleotides sorted by copy number detected and p-value. The d-# indicates the number copies of a sequence observed for the data in the rows.

TABLE 17
Expected versus observed sequences

| | Total Number | P-0.1 | P-0.05 | P-0.01 | P-0.05 |
|---|---|---|---|---|---|
| d-50 | 83,632 | 47,020 | 30,843 | 5,934 | 2,471 |
| d-100 | 52,647 | 29,106 | 19,446 | 3,893 | 1,615 |
| d-200 | 28,753 | 14,681 | 9,880 | 2,189 | 914 |
| d-500 | 10,155 | 4,342 | 2,927 | 725 | 315 |
| d-50 | 100.00% | 56.2% | 36.9% | 7.1% | 3.0% |
| d-100 | 100.00% | 55.3% | 36.9% | 7.4% | 3.1% |
| d-200 | 100.00% | 51.1% | 34.4% | 7.6% | 3.2% |
| d-500 | 100.00% | 42.8% | 28.8% | 7.1% | 3.1% |

| | | | | |
|---|---|---|---|---|
| Maximum expected | 10.0% | 5.0% | 1.0% | 0.5% |

[0882] As a control, the cancer and non-cancer samples were randomly divided into two groups. Such randomization of the samples significantly reduced the number of oligos found that differentiate between sample groups. Indeed, there was a 50-fold increase in informative oligos between the cancer/non-cancer grouping versus random grouping. FIG. 12E shows data as in Table 17 and indicates the number of observed informative oligos between the indicated sample groups.

[0883] FIG. 12F shows distinct groups of oligos that differentiate between cancer and non-cancer samples. The figure shows a heatmap of the 40 samples tested with oligos selected that had more than 500 copies and p-value less than 0.005. There are clear subpopulations emerging with a distinct non-cancer cohort at the top. The non-cancer samples have boxes around them on the left axis. FIG. 12G is similar and shows results with an additional 20 cancer and 20 non-cancer samples. As shown, analysis with the 80 samples provides the emergence of more distinct and larger clusters.

[0884] The data for the additional 80 samples was also used to compare the consistency of informative oligos identified in different screening experiments. Of the 315 informative oligos identified using the first set of 40 patients, 86% of them showed fold-change in a consistent manner when tested on the independent set of 40 patients.

### Example 21

### Probing Oligonucleotide Probe Library “cariMir” Interactions with Nucleic Acids

[0885] This Example presents a method of determining if oligonucleotides in probe libraries (which may be referred to as “TOP libraries” or “ADAPT libraries”) bind to nucleic acids, e.g., miRNAs and/or miRNA ribonucleoprotein complexes, via Watson-Crick base pairing (“WC”). Such WC binding oligonucleotide probes may be referred to as “cariMirs,” or alternately “aptimirs” or “miramers.” The method comprises assessing endonucleolytic cleavage of cariMirs catalyzed by Ago2-miR complexes. In this Example, cleavage events are determined using electrophoretic mobility shift assays (“EMSA”).

[0886] FIG. 14A shows an assay design to detect Ago2-miR-catalyzed cariMir cleavage. A cariMir 1401 is provided comprising an anti-miR sequence 1403 (dashed line) flanked by sequences 1402, 1404 (solid lines) which may comprise primer sequences, tags, labels or the like. The cariMir is contacted 1406 with an Ago2 (1407)-miR (1408; double line) complex to form a tripartite complex 1409 via hybridization of the cariMir to the Ago-bound miR guide 1408. The miR guide 1408 may be labeled, e.g., using a fluorescent label. If the cariMir is complementary to the Ago-bound miR guide, the cariMir will be subjected to specific endonucleolytic cleavage by Ago2 1410 at a predicted cleavage site 1412. The cleaved cariMir fragments 1411 can be detected, e.g., by electrophoresis or other nucleic acid detection method.

[0887] Protocol for cariMir Cleavage Assays

[0888] Fluorescent miR guide and complementary DNA cariMir target were synthesized by IDT. miR guide (5′-TAGAGGTACGTGCTGAGGCTT-3′; SEQ ID NO. 133) was 5′-phosphorylated and labeled internally with a fluorescein-conjugated dT (bold). CariMir target (5′-CTAGCATGACTGCAGTACGTCACTGCAGGCCTCAGCACGTACCTCTATAACCGCCCTGTCTCTTATACACA TCTGACGCTGCCGACGA-3′; SEQ ID NO. 134) comprised a 35 nucleotide variable region containing sequence complementary to the miR guide (underlined), flanked by PCR primer sequences (italics).

[0889] Recombinant hAgo2 (Creative Biomart) was preloaded with synthetic miR guide in cleavage buffer (150 mM NaCl, 5 mM MgCl₂, 2.5% glycerol, 0.05% Tween-20, 10 mM Tris-HCl, pH 7.4) for 10-20 min at room temperature, followed by addition of target cariMir. Reactions were stopped by addition of gel loading buffer and immediately resolved by non-denaturing PAGE using 10% TBE gels (Life Technologies). Gels were stained with SYBR Green I and imaged with a PXi gel imager (Syngene). Gel densitometric analysis was performed using Image J and data were plotted in Prism 6 (GraphPad).

[0890] Results

[0891] When cariMirs were mixed with recombinant Ago2 pre-loaded with synthetic miRs, cariMirs were cleaved producing the expected 5′ and 3′ cleavage products (see FIG. 14B), consistent with miR-guided Ago2 endonucleolytic action subsequent to specific hybridization of cariMir and miR within Ago2. FIG. 14B shows results of an electromobility shift assay performed using the above method. Various components of the method are shown in the lanes of the gel as indicated above the gel. In the rightmost lane on the gel image (labeled “miR+Ago2+cariMir”), all components are added to allow potential Ago-mediated cleavage of the cariMir to occur (see FIG. 14A). The amounts of the various components in the reaction mixture are indicated to the left of the gel. The figure shows that FAM-labeled miR forms duplexes with both its RNA target (bottom two arrows labeled “FAM-miR/RNA target” and “FAM-miR”) and a DNA cariMir containing the target sequence (arrow labeled “FAM-miR/cariMir duplex”). In the presence of recombinant hAgo2-miR complexes, the cariMir is sliced to produce 3′ and 5′ cleavage products (arrows labeled “cariMir cleavage products”) of sizes corresponding to specific endonucleolytic cleavage by Ago2. Further evidence of cariMir hybridization with Ago2-miR complexes was provided by electrophoretic mobility shift assays showing co-migration of single-stranded DNA cariMir with Ago2, indicated in FIG. 14B as the band labeled “cariMir bound to Ago2.”

[0892] Time course studies showed specific cleavage products accumulated over time, while cariMir was consumed, confirming the enzymatic activity of Ago2-miR complexes. FIG. 14C shows such time course of cariMir cleavage by Ago2-miR complexes. The entire reaction was used in the gel lanes to the left of the DNA Ladder. In these lanes, increasing levels of specific 3′ and 5′ cariMir cleavage products (arrows labeled “cariMir cleavage products,” lanes 2-5) are generated over the course of 60 minutes in the presence of recombinant hAgo2 complexed with a synthetic miR with full complementarity to sequence in the target cariMir, as demonstrated by the formation of miR/cariMir duplexes (arrow labeled “miR/cariMir duplex”). In the control lanes to the right of the DNA Ladder, the Ago2 and cariMir were added but without the Ago-bound guide miR. Here, in the presence of Ago2, but absent synthetic miR, spurious cleavage products are produced by Ago2 complexed with endogenous sf9 insect miRs that co-purify with the recombinant protein (lanes 7-10). FIG. 14D illustrates densitometric quantitation of gel bands from FIG. 14C further illustrating the accumulation of specific 3′ and 5′ cariMir cleavage products, and concomitant decrease of cariMir/miR duplexes, over time as cariMirs are enzymatically cleaved by Ago2-miR complexes.

[0893] Catalytic cariMir cleavage was demonstrated to be Mg²⁻-dependent as expected for Ago2 catalysis. See FIG. 14E. In the absence of Mg2+, cariMir is not cleaved by Ago2-miR (lane 2). The rate of cariMir cleavage increases with increasing Mg2+ concentration (lanes 3-6), as demonstrated by increased levels of specific cariMir cleavage products (green and blue arrows), and decreased levels of full-length cariMir and miR/cariMir duplexes (orange arrow), after 60 min incubation with Ago2-miR.

[0894] EMSA data established that a DNA “cariMir” binds specifically to guide miRNA complexed with Ago2 via Watson-Crick base pairing and is enzymatically cleaved by Ago2 at the predicted cleavage site. Adaptive Dynamic Artificial Poly-ligand Targeting (ADAPT) probing libraries may contain a subpopulation of oligos, termed cariMirs, that hybridize with miRs complexed with argonaute proteins. Without being bound by theory, the data in this Example suggest that enrichment of cariMirs from ADAPT libraries may depend on whether binding conditions favor interactions with Ago-miR complexes, which complexes are present (Ago2 versus other non-enzymatic argonautes), whether Ago2 complexes are active—and if binding conditions inhibit or enhance Ago2 enzymatic cleavage activity—and finally, whether recovery of bound oligos favors recovery of Ago-miR complexes. The cleavage products can also be detected via sequencing, e.g., using next generation approaches as described herein. Such high throughput approaches may be preferred when assessing olionucleotide probe libraries. In addition to sequencing of the olionucleotide probe libraries that bind various targets, the detection of miR cleavage events, e.g., using the method in this Example, can also be used to detect olionucleotide interactions with targets of interest.

### Example 22

### Probing Ago2-miR Cleavage Activity Using Molecular Beacons

[0895] Genes that control miR biogenesis and translational silencing activity, e.g., the gene encoding Argonaute 2 (Ago2), have shown incidence of genetic alterations across cancer types. In addition to relative levels of abundance, miR activity—in the form of circulating Ago2-miR enzyme complexes—can be used for detection purposes. Such detection may be used to characterize a phenotype, e.g., to provide diagnostic, prognostic or theranostic information for a disease or disorder. This Example presents a strategy to identify and quantify miRs complexed with argonaunte proteins in biological fluids using anti-miR molecular beacons to quantify Ago2-miR enzymatic activity.

[0896] FIG. 15A illustrates a schematic of anti-miR molecular beacon assay. Closed molecular beacon 1504 comprises a nucleotide sequence having a quenched fluorescent probe on the 5′ and 3′ ends. See FIG. 15B for a detailed illustration of the molecular beacon 1504. In step 1501 of FIG. 15A, the molecular beacon 1504 is contacted with an Ago2 protein complexed with a miR guide. In step 1502, the molecular beacon 1504 is cleaved by Ago2 enzymatic activity if the molecular beacon sequence is complementary to that of the miR guide. In such case, the closed molecular beacon 1504 is split such that the quencher is disassociated from the fluorescent entity (e.g., FAM) 1503. The fluorescent activity can then be detected and quantified as desired.

[0897] Protocol for Molecular Beacon Assays

[0898] Anti-miR molecular beacon probes were designed adopt a stem-loop secondary structure, with the loop containing the majority of the anti-miR sequence and a stem comprised of 4-6 GC base pairs; beacons were conjugated with FAM and BHQ1 at the 5′- and 3′-end, respectively (see Example 23 below). Anti-miR molecular beacons and corresponding 5′-phosphorylated miRs (Let-7a, miR-16, miR-21 and miR-92a) were synthesized by IDT.

[0899] Recombinant hAgo2 was preloaded with synthetic miR guide in cleavage buffer (150 mM NaCl, 5 mM MgCl₂, 2.5% glycerol, 0.05% Tween-20, 10 mM Tris-HCl, pH 7.4) for 20-60 min at room temperature, followed by addition of anti-miR beacon probes. For experiments with purified exosomes (±lysis, 30 min on ice in cleavage buffer supplemented with 0.35% Triton X-100), beacon probes were added directly to exosomes diluted in cleavage buffer. Reactions were stopped by addition of gel loading buffer and immediately resolved by denaturing or non-denaturing PAGE. To assess beacon cleavage in real time, reactions were monitored spectrofluorimetrically (excitation: 485/20 nm, emission: 528/20) at 47 second intervals using a Synergy 2 plate reader (BioTek). Data were analyzed and plotted in Prism 6.

[0900] Results

[0901] To demonstrate the efficacy of these probes, anti-miR molecular beacons were mixed with recombinant hAgo2 pre-loaded with synthetic miRs, and beacon cleavage was assessed by PAGE. After 2 hours, beacon cleavage products are generated in the presence, but not the absence, of recombinant hAgo2. See FIG. 15C-D. The appearance of cleavage products in reactions containing Ago2, but no exogenous synthetic miR, is due to the presence of endogenous insect miRs that co-purify with recombinant hAgo2 expressed in sf9 cells. FIG. 15C illustrates a gel showing that Ago2-Let-7a miR complexes cleave an anti-Let-7a molecular beacon. The various components of the method are shown in the lanes of the gel as indicated above the gel. In the rightmost lane on the gel image (labeled “Let-7a mol beacon +Let-7a miR +Ago2”), all components are added to allow potential Ago-mediated cleavage of the molecular beacon to occur (see FIG. 15A). FIG. 15C, lane 1, demonstrates that non-denaturing PAGE maintains beacons in the closed stem-loop conformation, thus quenching FAM reporter fluorescence. Beacons hybridized with complementary miR adopt an open conformation as demonstrated by the upward mobility shift of the miR/beacon duplex and increased fluorescence due to unquenching of the FAM reporter (lane 3). In the presence of Ago2-miR, fluorescent beacon products are generated and full-length beacon levels are decreased, indicating endonucleolytic cleavage activity by Ago2 (lane 4).

[0902] Similar to FIG. 15C, FIG. 15D shows that Ago2-miR complexes cleave anti-miR-16 and anti-miR-21 molecular beacons. Denaturing PAGE forces beacons to migrate in the open conformation, thus beacon bands are brightly fluorescent. When mixed with recombinant hAgo2, beacon cleavage products are detected by FAM fluorescence in both the presence (lanes 4 and 8) and absence (lanes 2 and 6) of exogenous miR, indicating that endogenous sf9 insect miR-16 and miR-21 co-purify with recombinant hAgo2 in complexes that are enzymatically active (lanes 2 and 6).

[0903] To quantify the kinetics of beacon cleavage, the accumulation of fluorescent cleavage products was followed over time using a spectrofluorimeter. Consistent with beacon cleavage, and concordant with PAGE analyses, fluorescent signals increased over time when anti-miR beacons were mixed with recombinant hAgo2 (FIG. 15E), and the rate of cleavage was Ago2 concentration-dependent (FIG. 15F). FIG. 15E shows spectrofluorimetric measurement of anti-miR beacon cleavage kinetics. Anti-miR molecular beacons were mixed with recombinant hAgo2 and accumulation of fluorescent beacon cleavage products was monitored over time. Curves represent beacon cleavage catalyzed by hAgo2 containing endogenous sf9 insect miRs. Kinetic data are baseline-corrected and control values (beacon only) were subtracted from experimental values. FIG. 15F shows spectrofluorimetric analysis of the concentration dependence of Ago2 on cleavage of anti-Let-7a beacon. Increasing concentrations of recombinant hAgo2 were mixed with a saturating concentration (500 nM) of beacon substrate. Cleavage of beacon was strongly dependent on Ago2 concentration, as expected for a catalytic enzyme. At 1 nM Ago2, cleavage activity was not detectable above background (beacon only). At higher concentrations, Ago2 catalyzed beacon cleavage; linear regression curve-fitting revealed a 20-fold increase in the initial rate of cleavage at 100 nM relative to 10 nM Ago2.

[0904] To test whether beacon probes are able to detect endogenous Ago2-miR complexes in a biological context, cleavage reactions were performed using purified microvesicles isolated from a human prostate cancer cell line (VCaP) known to contain both Ago2 and Let-7a miR. See Example 24 below for protocols. When reaction substrate comprised the contents derived from lysed VCaP microvesicles, anti-Let-7a beacon cleavage products were detected both by PAGE and spectrofluorometric measurements, consistent with the presence of Ago2-Let-7a complexes within the lumen of microvesicles. FIG. 15G shows PAGE analysis of anti-Let-7a beacon cleavage catalyzed by VCaP microvesicles. Microvesicle input was based on total protein content. Prior to mixing with beacon, purified microvesicles (1 or 10 μg input) were either lysed in buffer containing 0.35% Triton X-100 or left intact. Beacons were mixed with microvesicles±lysis and reactions were analyzed by PAGE after 2 and 20 hour incubation times. Beacon cleavage products were detectable (by FAM fluorescence) after 2 hours in reactions containing both lysed and intact microvesicles, and the amount of cleavage product increased significantly after 20 hours. Similar levels of cleavage product were generated by both lysed and intact microvesicles, suggesting that catalytic cleavage activity results predominantly from Ago2 associated with the outside surfaces of intact microvesicles. Note that the cleavage product profile generated by microvesicles after 20 hours correlates with the product profile generated by 505 nM recombinant hAgo2 after 2 hours, suggesting that cleavage catalyzed by microvesicles is specific.

[0905] Unexpectedly, Ago2-Let-7a cleavage activity was also detected when intact microvesicles served as substrate. In addition, the cleavage had nearly identical kinetics as seen with lysed microvesicles. FIG. 15H shows spectrofluorimetric analysis of anti-Let-7a beacon cleavage catalyzed by VCaP microvesicles. Prior to mixing with beacon, purified microvesicles (10 μg total protein input) were either lysed in buffer containing 0.35% Triton X-100 or left intact. Beacons were mixed with microvesicles±lysis and the kinetics of beacon cleavage were measured in a spectrofluorimeter. Linear regression analysis (not shown) indicated that lysed and intact microvesicles catalyze beacon cleavage at identical rates, substantiating the claim that the vast majority of active Ago2-Let-7a complexes reside on the outside surface of VCaP microvesicles. Furthermore, the concentration of microvesicle Ago2 in cleavage reactions was ˜1 nM (estimated by semi-quantitative western blot analysis; data not shown), suggesting that surface-associated microvesicle hAgo2 is more active relative to purified recombinant hAgo2 (see FIG. 15F) and may be found in a complex that increases enzyme turnover. Kinetic data are baseline-corrected and control values (beacon only) were subtracted from experimental values; data are plotted±SEM. These data are consistent with the idea that functional Ago2-miR complexes are found on the outside surface of microvesicles.

[0906] As detection of Ago2-miR complexes on the outside of microvesicles is an unprecedented finding, additional studies were performed to test the hypothesis that Ago2-miR complexes reside on the exterior surfaces of microvesicles. Lysed and intact microvesicles, purified from VCaP and LNCaP cell lines, were subjected to immunoprecipitation using antibodies directed against CD81 (a tetraspanin prevalent in vesicular membranes), Ago2 or control IgG; subsequently, the amount of co-immunoprecipitated Let-7a miR was quantified by qRT-PCR. Following anti-CD81 immunoprecipitation, qRT-PCR revealed high levels of Let-7a only when microvesicles remained intact; conversely, the amount of Let-7a that co-immunoprecipitated with Ago2 was higher when microvesicles were lysed. See FIGS. 15I-J. FIGS. 15I-J show quantitation of Let-7a miR co-immunoprecipitated with Ago2 derived from prostate cancer cell exosomes. Data are plotted±SD. Prior to immunoprecipitation, purified exosomes were either lysed in buffer containing 0.35% Triton X-100 or left intact. After immunoprecipitation, RNA was extracted and Let-7a copy number was quantified by qRT-PCR. CD81 positive controls showed that high levels of Let-7a were co-immunoprecipitated with CD81 if exosomes were intact, indicating that VCaP and LNCaP exosomes carry Let-7a as cargo. The high levels of Let-7a co-immunoprecipitated with Ago2 following exosome lysis indicate that the bulk of Let-7a cargo is complexed with Ago2 inside exosomes. However, Let-7a was also recovered from intact exosomes immunoprecipitated with Ago2, which suggests that a sub-population of VCaP and LNCaP exosomes carry Ago2 on their outer surface; and kinetic data demonstrate that the exterior-localized Ago2 is more catalytic with respect to Let-7a-guided cleavage activity. See FIG. 15G-H.

[0907] The data revealed in FIGS. 15I-J are consistent with the expected presence of luminal Ago2-Let-7a complexes. However, lower but not insignificant levels (relative to IgG controls) of Let-7a were also detected following anti-Ago2 immunoprecipitation of the intact microvesicles, suggesting that Ago2 associates with a fraction of microvesicle surfaces. Similar results were obtained with miR-16, miR-21 and miR-92a (data not shown). Without being bound by theory, these data, in conjunction with kinetic data from beacon assays showing equivalent cleavage activity with both intact and lysed microvesicles (FIG. 15H), surprisingly suggest that although VCaP microvesicles envelop a significant number of luminal Ago2-Let-7a complexes, it may be that the complexes associated with the exterior surfaces of a sub-population of microvesicles are enzymatically active, whereas luminal complexes are, to a large extent, silenced. Moreover, the data in this Example suggest that the surface-bound complexes are enzymatically active.

[0908] The beacon assays of the invention may provide diagnostic information from the fraction of enzymatically active Ago2-miR complexes associated with microvesicle surfaces, relative to the total population of circulating Ago2-miR complexes. Functional Ago2-miR complexes on microvesicle surfaces may be attractive candidates for ADAPT assay biomarkers. For example, recovery of hybridizing cariMirs may depend on Ago2-miR enzymatic activity and cariMir sequence complementarity to miRs. Thus, the presence of catalytically active Ago2-miR complexes will favor cariMirs with base pair mismatches at the cleavage site, whereas inactive complexes will favor cariMirs with full sequence complementarity to miRs.

### Example 23

### Anti-miR Molecular Beacon Design and Mfold Analysis

[0909] This Example provides the anti-miR molecular beacon design from Example 22 above. Anti-miR molecular beacon probes were designed adopt a stem-loop secondary structure, with the loop containing the majority of the anti-miR sequence and a stem comprised of 4-6 GC base pairs; beacons were conjugated with FAM and BHQ1 at the 5′- and 3′-end, respectively. Anti-miR molecular beacons and corresponding 5′-phosphorylated miRs were synthesized corresponding to Let-7a, miR-16, miR-21 and miR-92a.

[0910] FIG. 16A shows the molecular beacon design for hsa-Let-7a-5p. From upper to lower sequence, the figure shows the sequence of the beacon (SEQ ID NO. 135), the miR (SEQ ID NO. 136) with aligned beacon (SEQ ID NO. 137) below, and the expected 5′ product after Ago2 enzymatic cleavage (SEQ ID NO. 138). FIGS. 16B-C shows two stem loop structures predicted for the molecular beacon using mfold. Parameters for mfold included: linear DNA with oligo correction; 150 mM Na⁺, 5 mM Mg⁺⁺, 25° C., all other setting as default. Identical design and folding analysis was performed for miR-16 (FIG. 16D), miR-21 (FIG. 16E) and miR-92a (FIG. 16F).

### Example 24

### Protocols Used for Microvesicle Purification and Analysis

[0911] This Example provides protocols for microvesicle purification and analysis as used in Examples 22 and 23.

[0912] Microvesicle Purification

[0913] VCaP (ATCC #CRL-2876) and LNCaP cells were cultured as monolayers at 37° C., 5% CO2 in DMEM containing 10% vesicle-depleted FBS, 1 mM L-glutamine, lx pen/strep. After 3-4 days of growth, culture supernatants were collected and centrifuged at 400×g for 10 min at 4° C.; supernatants were collected and centrifuged at 2000×g for 20 min at 4° C. to remove cell debris. Clarified culture supernatants were concentrated to <15 mL by repeated centrifugation at 1000×g through 100,000 NMWL Centricon Plus filters (Millipore), washed once with PBS, and concentrated to a final volume ≦12 mL. Concentrated supernatants were layered atop 30% sucrose cushions and centrifuged at 100,000×g for 75 min at 4° C. The cushion interface (˜4 mL) was collected, diluted in PBS, and centrifuged at 100,000×g for 70 min at 4° C. to pellet microvesicles. Microvesicle pellets were resuspended in 200 μL PBS overnight at 4° C. Total protein content of purified microvesicles was determined by BCA assay (Thermo Scientific Pierce), with typical yields of 2-4 μg/μL.

[0914] Microvesicle Immunoprecipitation and qRT-PCR Analysis

[0915] Magnabind magnetic beads (Pierce) were pre-bound with capture antibodies (mouse monoclonal anti-CD81, BD Biosciences; mouse monoclonal anti-Ago2, Abcam; mouse IgG, Santa Cruz) in binding buffer (1% BSA, PBS) for 1 hour at 4° C., washed once with binding buffer, then blocked with 0.5% F-127 in PBS for 1 hour at 4° C. Prior to immunoprecipitation, purified VCaP and LNCaP microvesicles (1 μg total protein) were incubated for 60 min on ice in either PBS or lysis buffer (0.35% Triton X-100, 10 mM NaCl, 1 mM MgCl₂, 500 mM sucrose, 0.2 mM EDTA, 0.5 mM DTT, 20 mM HEPES, pH 7.9) containing protease inhibitors (Roche). Antibody-conjugated beads (50 μL) were added to samples (diluted in 1 mL binding buffer) and reactions were incubated with rotation for 1 hour at room temperature. Beads were isolated magnetically, washed twice with either binding buffer (for intact microvesicle samples) or stringent wash buffer (for lysed microvesicle samples; 600 mM NaCl, 1% NP-40, 1% BSA, 2 mM EDTA, 50 mM Tris-HCl, pH 7.5), resuspended in 100 μL binding buffer, then immediately homogenized by addition of 750 μL TRIzol LS (Life Technologies). MicroRNA was extracted using miRNeasy kits (Qiagen), reverse transcribed, and pre-amplified by PCR. Human Let-7a miR was detected by qRT-PCR TaqMan assays (Life Technologies) in a 7900 (Applied Biosystems). A standard curve was used to convert C_{T} values to relative copy number. Data were analyzed and plotted in Prism 6.

### Example 25

### CariMir Library Design

[0916] This Example provides an approach to rationally design aptamiR probing libraries comprising 1) fully complementary anti-miR sequences cleavable by argonaute proteins and 2) anti-miR sequences with mismatched target nucleotides to prevent cleavage by argonaute proteins. The libraries in this Example are targeted to Ago2 mediated miR cleavage.

[0917] Recovery of hybridized aptamiRs from binding reactions can depend on aptamiR sequence complementarity to Ago2-bound miRs and Ago2-miR enzymatic activity. The presence of catalytically active Ago2-miR complexes can favor recovery of aptamiRs with base pair mismatches at the cleavage site, whereas inactive complexes can favor recovery of aptamiRs with full sequence complementarity to miRs.

[0918] The site of target cleavage by Ago2 is set by the miR guide, which occurs between target nucleotides opposite positions 10 and 11 of the guide relative to its 5′ end. See FIG. 17A. MicroRNA Let-7a is shown at the top of the figure (SEQ ID NO. 136). As indicated below the sequence, the miR comprises various regions (from 5′ to 3′): an anchor region from nucleotides 2-8 flanked by uracils, a central region comprising nucleotides 9-12, a supplementary region from nucleotides 13-16, and a tail from nucleotide 17 onwards. As indicated, Ago2 cleavage occurs in the central region between nucleotides 10 and 11. Beneath, the let-7a microRNA sequence is shown aligned to a cariMir, which comprises a complementary sequence to the miR with flanking regions (SEQ ID NO. 151). Cleavage requires full sequence complementarity between miR and target sequence. Mismatched base-pairing in the central region prevents cleavage. Specifically, mismatched base-pairs at guide positions 10 and 11 inhibit cleavage but have little effect on target binding (Wee 2012 Cell; Martinez 2004 Genes Dev). Therefore, non-cleavable cariMirs are configured to comprise base-pair mismatches at sites corresponding to miR guide positions 10 and 11.

[0919] As shown in FIG. 17A and described above, cariMirs can comprise a region complementary to a target miR flanked by primer sequences. The primer sequences facilitate any desired functionality, including without limitation amplification, sequencing, labeling, synthesis, diversity and other traits. Two designs are presented for the anti-miR sequences flanked by 5′ and 3′ sequences as follows:

1) F-Trin-B design:
5′ CTAGCATGACTGCAGTACGT[neo spacer][anti-miR]
CTGTCTCTTATACACATCTGACGCTGCCGACGA 3′
2) FLin-Neo design:
5′ GATCTCCTGTCATCTCACCT[anti-miR]
TGTAGAACCATGTCGTCAGTGT 3′

[0920] As seen, the F-Trin-B design comprises flanking sequences 5′-CTAGCATGACTGCAGTACGT (SEQ ID NO. 152) and 5′-CTGTCTCTTATACACATCTGACGCTGCCGACGA (SEQ ID NO. 153). The FLin-Neo design comprises flanking sequences 5′-GATCTCCTGTCATCTCACCT (SEQ ID NO. 154) and 5′-TGTAGAACCATGTCGTCAGTGT (SEQ ID NO. 155). F-Trin-B design cariMirs comprise, in addition to the anti-miR sequence, a variable number of spacer nucleotides (derived from either the left or right side of the Neo primer sequence) that expand the total length of the insert to 35 nt, which can be configured to match the length of the variable region (e.g., 35 nucleotides) of the oligonucleotide probe libraries of the application (also referred to as ADAPT libraries). Based on a 35 nucleotide variable region, the F-Trin-B cariMirs are 88 nucleotides in total length. Such design makes F-Trin-B cariMirs compatible with oligonucleotide probing libraries for purposes of amplification, sequencing and the like (e.g., PCR and NGS sequencing). Furthermore, inclusion of the left side of the Neo primer sequence in the spacer region makes it possible, after probing, to separate cariMirs from ADAPT aptamers by using a B-Neo hybrid PCR primer to selectively amplifiy cariMirs (see NGS scheme below). On the other hand, the FLin-Neo design cariMirs do not contain spacers and can be variable in length (e.g., 58-70 nucleotides) due to the variable length of anti-miR sequence inserts (e.g., 16-28 nucleotides). As these cariMirs are not necessarily compatible with oligonucleotide probing libraries (e.g., F-Trin-B), they are more intended to be used as miR-specific assays. Characteristics of cariMirs are shown in Table 18. All lengths in the table are in nucleotides.

TABLE 18
CariMir statistics

| miR length distribution | | | Neo spacer length | CariMir length | |
|---|---|---|---|---|---|
| Length | Number | Percentage | (F-Trin-B only) | F-Trin-B | FLin-Neo |
| 16 | 8 | 0.31% | 19 | 88 | 58 |
| 17 | 60 | 2.32% | 18 | 88 | 59 |
| 18 | 77 | 2.98% | 17 | 88 | 60 |
| 19 | 97 | 3.75% | 16 | 88 | 61 |
| 20 | 164 | 6.34% | 15 | 88 | 62 |
| 21 | 513 | 19.82% | 14 | 88 | 63 |
| 22 | 1150 | 44.44% | 13 | 88 | 64 |
| 23 | 378 | 14.61% | 12 | 88 | 65 |
| 24 | 96 | 3.71% | 11 | 88 | 66 |
| 25 | 33 | 1.28% | 10 | 88 | 67 |
| 26 | 8 | 0.31% | 9 | 88 | 68 |
| 27 | 3 | 0.12% | 8 | 88 | 69 |
| 28 | 1 | 0.04% | 7 | 88 | 70 |

[0921] As noted above, Ago2 cleavable cariMirs comprise full-length anti-miR sequences (˜22 nt) with complete complementarity to the target miR, whereas non-cleavable cariMirs comprise full-length anti-miR sequences (˜22 nt) with adjacent mismatches at sites corresponding to miR positions 10 and 11, using the following rules for cariMir nucleotide substitutions shown in Table 19.

TABLE 19
Mismatch substitution rules

| miR | CariMir | CariMir |
|---|---|---|
| nucleotide | complement | substitution |
| A | T | C |
| U | A | T |
| G | C | T |
| C | G | A |

[0922] These cariMir substitutions are intended to avoid non-Watson-Crick base-pairing, specifically G•U and G•A wobble pairs, that might lead to partial, rather than complete, mismatches at the cleavage site. Examplary sequences comprising perfect match and mismatch are shown in FIG. 17B. In the figure, the upper sequence is miR Let-7a and the sequences beneath are complementary cariMir sequences that are Ago2 cleavable or non-cleavable as indicated. The non-cleavable sequence comprises mismatch at positions 10-11 according to the rules in Table 19.

[0923] Based on the above guidelines, cariMir libraries were constructed. The cariMir libraries comprise anti-miR sequences corresponding to all human, mature microRNA sequences derived from miRBase 21 (2588 total miR sequences) (available at www.mirbase.org). These microRNA sequences are provided herewith in SEQ ID NO. 177-2764. The microRNA in the Sequence Listing have an identifier such as “hsa-miR-[name] MIMAT[number]” wherein, according to convention, the name is “hsa-miR-” for “Homo Sapiens microRNA” followed by a name comprising numbers and letters, and the “MIMAT[number]” designators are mirBase accession numbers. As an example, SEQ ID NO. 181 is denoted as “hsa-miR-576-3p MIMAT0004796,” which indicates Homo Sapiens miR-576-3p.

[0924] Four separate cariMirs are constructed for each miR sequence following the F-Trin-B design shown above. The full “Neo Spacer” sequence is 5′-GATCTCCTGTCATCTCACCT (SEQ ID NO. 154). The amount of spacer inserted into each cariMir is adjusted to account for the length of the miR, such that all F-Trin-B sequences maintain the same length (as described above). These four categories of cariMirs comprise:

[0925] F-Trin-B Category 1) Fully complementary anti-miR sequences (i.e. cleavable) flanked by F-Trin-B primers (i.e., 5′-CTAGCATGACTGCAGTACGT (SEQ ID NO. 152) and 5′-CTGTCTCTTATACACATCTGACGCTGCCGACGA (SEQ ID NO. 153)) and a left Neo spacer. The full construct is as shown in the “F-Trin-B design” design indicated above. These anti-miR sequences are provided herewith in SEQ ID NO. 2765-5352. The anti-miR in the Sequence Listing have an identifier such as “Full comp hsa-miR-[name] MIMAT[number],” to indicate that these are fully complementary sequences to the denoted microRNA. The length of the left Neo Spacer for each construct is adjusted depending on the length of the miR sequence as shown in Table 20.

TABLE 20
Left Neo Spacer

| microRNA | Left Neo | SEQ ID |
|---|---|---|
| length (nt) | Spacer Sequence | NO. |
| 25 | 5′-GATCTCCTGT | 157 |
| 24 | 5′-GATCTCCTGTC | 158 |
| 23 | 5′-GATCTCCTGTCA | 159 |
| 22 | 5′-GATCTCCTGTCAT | 160 |
| 21 | 5′-GATCTCCTGTCATC | 161 |
| 20 | 5′-GATCTCCTGTCATCT | 162 |
| 19 | 5′-GATCTCCTGTCATCTC | 163 |
| 18 | 5′-GATCTCCTGTCATCTCA | 164 |
| 17 | 5′-GATCTCCTGTCATCTCAA | 165 |
| 16 | 5′-GATCTCCTGTCATCTCAAC | 166 |

[0926] F-Trin-B Category 2) Fully complementary anti-miR sequences (i.e. cleavable) flanked by F-Trin-B primers (see above) and a right Neo spacer. The full construct is as shown in the “F-Trin-B design” design indicated above. As with Category 1), these anti-miR sequences are provided herewith in SEQ ID NO. 2765-5352. The anti-miR in the Sequence Listing have an identifier such as “Full comp hsa-miR-[name] MIMAT[number],” to indicate the these are fully complementary sequences to the denoted microRNA. The length of the right Neo Spacer is adjusted depending on the length of the miR sequence as shown in Table 21.

TABLE 21
Left Neo Spacer

| microRNA | Right Neo | SEQ ID |
|---|---|---|
| length (nt) | Spacer Sequence | NO. |
| 25 | 5′-CATCTCACCT | 167 |
| 24 | 5′-TCATCTCACCT | 168 |
| 23 | 5′-GTCATCTCACCT | 169 |
| 22 | 5′-TGTCATCTCACCT | 170 |
| 21 | 5′-CTGTCATCTCACCT | 171 |
| 20 | 5′-CCTGTCATCTCACCT | 172 |
| 19 | 5′-TCCTGTCATCTCACCT | 173 |
| 18 | 5′-CTCCTGTCATCTCACCT | 174 |
| 17 | 5′-TCTCCTGTCATCTCACCT | 175 |
| 16 | 5′-ATCTCCTGTCATCTCACCT | 176 |

[0927] F-Trin-B Category 3) Mismatched anti-miR sequences (i.e. non-cleavable) with a left Neo spacer. These are similar to Category 1 except that the anti-miR sequences are designed to be non-cleavable. The full construct is as shown in the “F-Trin-B design” design indicated above. These anti-miR sequences are provided herewith in SEQ ID NO. 5353-7940. The anti-miR in the Sequence Listing have an identifier such as “Mismatch hsa-miR-[name] MIMAT[number],” to indicate these are mismatched sequences as compared to the indicated microRNA. The length of the left Neo Spacer for each construct is adjusted depending on the length of the miR sequence as shown in Table 20 above.

[0928] F-Trin-B Category 4) Mismatched anti-miR sequences (i.e. non-cleavable) with a right Neo spacer. These are similar to Category 2 except that the anti-miR sequences are designed to be non-cleavable. The full construct is as shown in the “F-Trin-B design” design indicated above. These anti-miR sequences are provided herewith in SEQ ID NO. 5353-7940. The anti-miR in the Sequence Listing have an identifier such as “Mismatch hsa-miR-[name] MIMAT[number],” to indicate these are mismatched sequences as compared to the indicated microRNA. The length of the right Neo Spacer for each construct is adjusted depending on the length of the miR sequence as shown in Table 21 above.

[0929] Exemplary full sequences for each of the four categories based on microRNA hsa-miR-576-3p (SEQ ID NO. 181) are as follows:

F-Trin-B Category 1)
(SEQ ID NO. 7941)
5′ CTAGCATGACTGCAGTACGTGATCTCCTGTCATGATTCCAATTTTTC
CACATCTTCTGTCTCTTATACACATCTGACGCTGCCGACGA
F-Trin-B Category 2)
(SEQ ID NO. 7942)
5′ CTAGCATGACTGCAGTACGTGATCTCCTGTCATGATTCCAATTTCCC
CACATCTTCTGTCTCTTATACACATCTGACGCTGCCGACGA
F-Trin-B Category 3)
(SEQ ID NO. 7943)
5′ CTAGCATGACTGCAGTACGTTGTCATCTCACCTGATTCCAATTTTTC
CACATCTTCTGTCTCTTATACACATCTGACGCTGCCGACGA
F-Trin-B Category 4)
(SEQ ID NO. 7944)
5′ CTAGCATGACTGCAGTACGTTGTCATCTCACCTGATTCCAATTTCCC
CACATCTTCTGTCTCTTATACACATCTGACGCTGCCGACGA

[0930] Two separate cariMirs are constructed for each miR sequence following the FLin-Neo design presented above. The FLin-Neo design comprises the anti-miR sequence sandwiched between flanking sequences 5′-GATCTCCTGTCATCTCACCT (SEQ ID NO. 154) and 5′-TGTAGAACCATGTCGTCAGTGT (SEQ ID NO. 155).

[0931] FLin-Neo Category 1) Fully complementary anti-miR sequences (i.e. cleavable) flanked by FLin-Neo primers 5′-GATCTCCTGTCATCTCACCT (SEQ ID NO. 154) and 5′-TGTAGAACCATGTCGTCAGTGT (SEQ ID NO. 155). The full construct is as shown in the “FLin-Neo design” design indicated above. The anti-miR sequences are provided herewith as every third sequence in SEQ ID NO. 182-7939. The anti-miR in the Sequence Listing have an identifier such as “Full comp hsa-miR-[name] MIMAT[number],” to indicate these are fully complementary sequences to the corresponding microRNA.

[0932] FLin-Neo Category 2) Mismatched anti-miR sequences (i.e. non-cleavable) flanked by the FLin-Neo primers. The full construct is as shown in the “FLin-Neo design” design indicated above. The anti-miR sequences are provided herewith as every third sequence in SEQ ID NO. 183-7940. The anti-miR in the Sequence Listing have an identifier such as “Mismatch hsa-miR-[name] MIMAT[number],” to indicate these are mismatched sequences as compared to the indicated microRNA.

[0933] Exemplary sequences for each based on hsa-miR-576-3p (SEQ ID NO. 181) are as follows:

FLin-Neo Category 1)
(SEQ ID NO. 7945)
5′ GATCTCCTGTCATCTCACCTGATTCCAATTTTTCCACATCTTTGTAG
AACCATGTCGTCAGTGT
FLin-Neo Category 2)
(SEQ ID NO. 7946)
5′ GATCTCCTGTCATCTCACCTGATTCCAATTTCCCCACATCTTTGTAG
AACCATGTCGTCAGTGT

[0934] The flanking primers in the designs above can be modified as desired to facilitate steps such as amplification, sequencing, capture and the like. The balanced primer approach described in Example 23 of Int'l Patent Publication WO/2015/031694 (Appl. No. PCT/US2014/053306, filed Aug. 28, 2014) can be used.

[0935] To demonstrate the ability of the anti-miRs to form a complex with Ago2-microRNA complexes, anti-Let-7a oligonucleotide probes were used to detect and capture Ago2-Let-7a complexes present in human plasma samples. FIG. 17C shows results obtained using anti-Ago monoclonal antibodies bound to beads to capture Ago2 from human plasma. After capture, the mixtures were incubated with FAM-labeled anti-Let-7a oligonucleotide probes designed as above. The bead-bound Ago2 complexes were resolved by TBE-urea PAGE to directly detect FAM-labeled anti-Let-7a oligonucleotide probes (gel labeled “In-gel flour detection”) and SDS-PAGE followed by anti-Ago2 immunoblot (gel labeled “Anti-Ago2 immunoblot”) to detect Ago2 (gel lanes labeled “Ago2 IP”). The experiments were also performed using bead-conjugated anti-IgG antibodies (gel lanes labeled “IgG IP”) or unconjugated beads (gel lanes labeled “Bead only”) as negative controls. As seen in FIG. 17C, the FAM-labeled anti-Let-7a oligonucleotide probes were detected in the band in the position corresponding to Ago2, thus confirming that the anti-miR construct binds Ago2-Let-7a complexes. In a related set of experiments, microbead-conjugated anti-Mir was used to capture Ago2-miR complexes from human plasma. For the gel shown in FIG. 17D, bead-bound anti-Let-7a oligonucleotide probes complementary to the 5′ microRNA seed sequence, 5′ microRNA seed+3′ microRNA sequence, or the full miR sequence were used to capture Ago2 from human plasma. Captured material was resolved by SDS-PAGE followed by anti-Ago2 immunoblot to detect Ago2. The results indicate that beads conjugated to anti-Let-7a oligonucleotide probes were able to pull down (immunoprecipitate) Ago2-Let-7a complexes from the plasma samples. Cleavage of the probes such as described in the Examples 22 and 23 can be used the complexes.

### Example 26

### Vesicle Fraction Protein Recovery

[0936] In this Example, the protein content of whole plasma and microvesicle fractions were compared. Microvesicle precipitates were obtained by fractionation of healthy (non-cancer) human blood plasma samples using polyethylene glycol (PEG) or by ultracentrifugation (UC). Proteins within the precipitates were identified using liquid chromatography-tandem mass spectrometry (LC-MS/MS) as in Example 27 below. Briefly, 5 μg of each sample type were separated by SDS-PAGE, excised gel bands were digested with trypsin and extracted peptides detected by LC-MS/MS.

[0937] Table 22 lists proteins that were identified in the microvesicle fractions. Accession numbers in the table are from the UniProt database (www.uniprot.org). “GN=” is followed by the gene name. The columns Whole Plasma, PEG ppt (PEG precipitate) and UC pellet show the number of peptide spectrum matches (PSM) for proteins in whole plasma, PEG precipitated fraction, and ultracentrifugation (UC), respectively. The number of PSMs is the total number of identified peptide spectra matched for the protein. The proteins with no counts in Table 22 were detected with low frequency in the supernatant of the UC pellet after overnight centrifugation. PEG precipitation recovers the microvesicle content in addition to other soluble molecular components but was found to significantly reduce at least 11 abundant plasma proteins (e.g., albumin, Alpha-1-antitrypsin, etc), and, in part, likely also other soluble molecular contents. Compare PSMs in Table 22.

TABLE 22
Proteins Found in Plasma and Microvesicle Fractions

| Accession | | Whole | PEG | UC |
|---|---|---|---|---|
| number | Name | Plasma | ppt | pellet |
| P02768 | Serum albumin GN = ALB | 442 | 92 | 87 |
| P01024 | Complement C3 GN = C3 | 142 | 287 | 139 |
| P01023 | Alpha-2-macroglobulin GN = A2M | 136 | 139 | 84 |
| P02787 | Serotransferrin GN = TF | 106 | 11 | 28 |
| P04114 | Apolipoprotein B-100 GN = APOB | 84 | 187 | 172 |
| P04264 | Keratin, type II cytoskeletal 1 GN = KRT1 | 65 | 59 | 60 |
| P13645 | Keratin, type I cytoskeletal 10 GN = KRT10 | 62 | 56 | 54 |
| P02671 | Fibrinogen alpha chain GN = FGA | 52 | 153 | 110 |
| P01857 | Ig gamma-1 chain C region GN = IGHG1 | 41 | 52 | 25 |
| P01009 | Alpha-1-antitrypsin GN = SERPINA1 | 41 | 5 | 16 |
| P02675 | Fibrinogen beta chain GN = FGB | 38 | 133 | 108 |
| P35908 | Keratin, type II cytoskeletal 2 epidermal GN = KRT2 | 38 | 36 | 36 |
| P00738 | Haptoglobin GN = HP | 36 | | 10 |
| P01860 | Ig gamma-3 chain C region GN = IGHG3 | 32 | 41 | 23 |
| P01876 | Ig alpha-1 chain C region GN = IGHA1 | 31 | 23 | 20 |
| P01011 | Alpha-1-antichymotrypsin GN = SERPINA3 | 31 | 5 | 7 |
| P0C0L4 | Complement C4-A GN = C4A | 31 | 70 | 33 |
| P01834 | Ig kappa chain C region GN = IGKC | 30 | 33 | 31 |
| P0C0L5 | Complement C4-B GN = C4B | 30 | 73 | 68 |
| P00450 | Ceruloplasmin GN = CP | 28 | 2 | 1 |
| P01871 | Ig mu chain C region GN = IGHM | 27 | 55 | 84 |
| P02679 | Fibrinogen gamma chain GN = FGG | 26 | 87 | 76 |
| P35527 | Keratin, type I cytoskeletal 9 GN = KRT9 | 25 | 35 | 33 |
| P01859 | Ig gamma-2 chain C region GN = IGHG2 | 24 | 22 | 8 |
| P02751 | Fibronectin GN = FN1 | 24 | 80 | |
| P08603 | Complement factor H GN = CFH | 22 | 38 | 33 |
| P01008 | Antithrombin-III GN = SERPINC1 | 21 | 1 | 8 |
| P0C0L4 | Complement C4-A GN = C4A | 20 | | |
| P02647 | Apolipoprotein A-I GN = APOA1 | 19 | 8 | 10 |
| P02774 | Vitamin D-binding protein GN = GC | 19 | | |
| P04220 | Ig mu heavy chain disease protein | 19 | 36 | 78 |
| P01861 | Ig gamma-4 chain C region GN = IGHG4 | 18 | 19 | 16 |
| P02790 | Hemopexin GN = HPX | 18 | 1 | 4 |
| P01877 | Ig alpha-2 chain C region GN = IGHA2 | 17 | 12 | 14 |
| P0CG05 | Ig lambda-2 chain C regions GN = IGLC2 | 16 | 17 | 17 |
| P19827 | Inter-alpha-trypsin inhibitor heavy chain H1 GN = ITIH1 | 15 | 15 | 6 |
| P01042 | Kininogen-1 GN = KNG1 | 15 | | 9 |
| Q14624 | Inter-alpha-trypsin inhibitor heavy chain H4 GN = ITIH4 | 15 | | |
| P19823 | Inter-alpha-trypsin inhibitor heavy chain H2 GN = ITIH2 | 14 | 17 | 7 |
| P01019 | Angiotensinogen GN = AGT | 14 | | 3 |
| P00747 | Plasminogen GN = PLG | 14 | 16 | 9 |
| P06727 | Apolipoprotein A-IV GN = APOA4 | 13 | 2 | 10 |
| P02533 | Keratin, type I cytoskeletal 14 GN = KRT14 | 13 | 10 | 8 |
| P00751 | Complement factor B GN = CFB | 13 | 4 | 6 |
| P0CG04 | Ig lambda-1 chain C regions GN = IGLC1 | 12 | | |
| Q14624 | Inter-alpha-trypsin inhibitor heavy chain H4 GN = ITIH4 | 12 | | 11 |
| P02763 | Alpha-1-acid glycoprotein 1 GN = ORM1 | 12 | | 1 |
| Q14624 | Inter-alpha-trypsin inhibitor heavy chain H4 GN = ITIH4 | 11 | 5 | 7 |
| P02765 | Alpha-2-HS-glycoprotein GN = AHSG | 10 | 1 | 3 |
| P04217 | Alpha-1B-glycoprotein GN = A1BG | 10 | | 2 |
| B9A064 | Immunoglobulin lambda-like polypeptide 5 GN = IGLL5 | 10 | 15 | 11 |
| P05155 | Plasma protease C1 inhibitor GN = SERPING1 | 9 | 1 | 1 |
| P01597 | Ig kappa chain V-I region DEE | 9 | 9 | 6 |
| P02649 | Apolipoprotein E GN = APOE | 8 | 10 | 13 |
| P01606 | Ig kappa chain V-I region OU | 8 | | |
| P19652 | Alpha-1-acid glycoprotein 2 GN = ORM2 | 8 | | |
| P43652 | Afamin GN = AFM | 8 | | |
| P01767 | Ig heavy chain V-III region BUT | 7 | 6 | 6 |
| P04003 | C4b-binding protein alpha chain GN = C4BPA | 7 | 28 | 43 |
| P02538 | Keratin, type II cytoskeletal 6A GN = KRT6A | 7 | 13 | 10 |
| P36955 | Pigment epithelium-derived factor GN = SERPINF1 | 6 | 2 | 2 |
| P02743 | Serum amyloid P-component GN = APCS | 6 | 4 | 2 |
| P02749 | Beta-2-glycoprotein 1 GN = APOH | 6 | 3 | 4 |
| P10909 | Clusterin GN = CLU | 6 | 5 | 7 |
| P13647 | Keratin, type II cytoskeletal 5 GN = KRT5 | 5 | 7 | 6 |
| P01766 | Ig heavy chain V-III region BRO | 5 | 7 | 8 |
| P01781 | Ig heavy chain V-III region GAL | 5 | 5 | 4 |
| P04196 | Histidine-rich glycoprotein GN = HRG | 5 | 8 | 3 |
| P01768 | Ig heavy chain V-III region CAM | 5 | | |
| P04004 | Vitronectin GN = VTN | 5 | 8 | 23 |
| P05546 | Heparin cofactor 2 GN = SERPIND1 | 5 | 4 | 7 |
| P02766 | Transthyretin GN = TTR | 5 | | 3 |
| P27169 | Serum paraoxonase/arylesterase 1 GN = PON1 | 4 | 2 | 3 |
| P01765 | Ig heavy chain V-III region TIL | 4 | 6 | 6 |
| P02747 | Complement C1q subcomponent subunit C GN = C1QC | 4 | 5 | 4 |
| P05543 | Thyroxine-binding globulin GN = SERPINA7 | 4 | | |
| P01596 | Ig kappa chain V-I region CAR | 4 | 4 | 3 |
| P01625 | Ig kappa chain V-FV region Len | 4 | 4 | 4 |
| P02760 | Protein AMBP GN = AMBP | 4 | 2 | 2 |
| P13646 | Keratin, type I cytoskeletal 13 GN = KRT13 | 4 | | |
| P01620 | Ig kappa chain V-III region SIE | 4 | 8 | 5 |
| P08697 | Alpha-2-antiplasmin GN = SERPINF2 | 4 | | 2 |
| P01764 | Ig heavy chain V-III region VH26 | 4 | 7 | 6 |
| P01031 | Complement C5 GN = C5 | 3 | 36 | 28 |
| P00734 | Prothrombin GN = F2 | 3 | 1 | |
| P06312 | Ig kappa chain V-IV region (Fragment) GN = IGKV4-1 | 3 | 3 | 3 |
| P10643 | Complement component C7 GN = C7 | 3 | 2 | 2 |
| P01598 | Ig kappa chain V-I region EU | 3 | | 5 |
| P01621 | Ig kappa chain V-III region NG9 (Fragment) | 3 | 3 | |
| P06396 | Gelsolin GN = GSN | 3 | | |
| P08519 | Apolipoprotein(a) GN = LPA | 3 | 8 | 13 |
| P00698 | Lysozyme C OS = Gallus gallus GN = LYZ | 3 | 2 | 2 |
| P18135 | Ig kappa chain V-III region HAH | 3 | 7 | 5 |
| P80748 | Ig lambda chain V-III region LOI | 2 | 3 | 3 |
| P08185 | Corticosteroid-binding globulin GN = SERPINA6 | 2 | | |
| P25311 | Zinc-alpha-2-glycoprotein GN = AZGP1 | 2 | | |
| P09871 | Complement C1s subcomponent GN = C1S | 2 | 4 | 6 |
| Q03591 | Complement factor H-related protein 1 GN = CFHR1 | 2 | 6 | 5 |
| P02748 | Complement component C9 GN = C9 | 2 | 4 | 4 |
| Q86YZ3 | Hornerin GN = HRNR | 2 | 14 | 2 |
| O14791 | Apolipoprotein L1 GN = APOL1 | 2 | 2 | 4 |
| P02746 | Complement C1q subcomponent subunit B GN = C1QB | 2 | 5 | 6 |
| P01613 | Ig kappa chain V-I region Ni | 2 | 3 | 2 |
| P01763 | Ig heavy chain V-III region WEA | 2 | 3 | 3 |
| P01617 | Ig kappa chain V-II region TEW | 2 | 3 | 3 |
| P29622 | Kallistatin GN = SERPINA4 | 2 | | 3 |
| P81605 | Dermcidin GN = DCD | 2 | 2 | 2 |
| P02750 | Leucine-rich alpha-2-glycoprotein GN = LRG1 | 2 | | |
| P06396 | Gelsolin GN = GSN | 2 | 1 | |
| P02753 | Retinol-binding protein 4 GN = RBP4 | 2 | | |
| Q9UQE7 | Structural maintenance of chromosomes protein 3 GN = SMC3 | 2 | | |
| P35030 | Trypsin-3 GN = PRSS3 | 2 | 2 | 2 |
| P01591 | Immunoglobulin J chain GN = IGJ | 2 | 1 | 3 |
| P13671 | Complement component C6 GN = C6 | 2 | 3 | 2 |
| P49908 | Selenoprotein P GN = SEPP1 | 2 | | 1 |
| P69905 | Hemoglobin subunit alpha GN = HBA1 | 2 | | |
| P04207 | Ig kappa chain V-III region CLL | 2 | 1 | 1 |
| Q8NE71 | ATP-binding cassette sub-family F member 1 GN = ABCF1 | 2 | | |
| P05090 | Apolipoprotein D GN = APOD | 1 | 2 | 5 |
| P05154 | Plasma serine protease inhibitor GN = SERPINA5 | 1 | | 1 |
| Q08499 | cAMP-specific 3′,5′cyclic phosphodiesterase 4D GN = PDE4D | 1 | | |
| P06681 | Complement C2 GN = C2 | 1 | | |
| P07357 | Complement component C8 alpha chain GN = C8A | 1 | 5 | 5 |
| P00736 | Complement C1r subcomponent GN = C1R | 1 | 4 | 4 |
| O43866 | CD5 antigen-like GN = CD5L | 1 | 5 | 9 |
| P36980 | Complement factor H-related protein 2 GN = CFHR2 | 1 | 2 | |
| Q5D862 | Filaggrin-2 GN = FLG2 | 1 | 9 | 1 |
| P68871 | Hemoglobin subunit beta GN = HBB | 1 | | |
| P05156 | Complement factor I GN = CFI | 1 | 1 | 1 |
| P01616 | Ig kappa chain V-II region MIL | 1 | 1 | 1 |
| P01825 | Ig heavy chain V-II region NEWM | 1 | 1 | 1 |
| P07360 | Complement component C8 gamma chain GN = C8G | 1 | 2 | 1 |
| P01714 | Ig lambda chain V-III region SH | 1 | 2 | 1 |
| Q96PD5 | N-acetylmuramoyl-L-alanine amidase GN = PGLYRP2 | 1 | | |
| Q6UWP8 | Suprabasin GN = SBSN | 1 | 4 | |
| P04208 | Ig lambda chain V-I region WAH | 1 | 2 | 1 |
| P01717 | Ig lambda chain V-IV region Hil | 1 | 1 | 1 |
| P35542 | Serum amyloid A-4 protein GN = SAA4 | 1 | | 2 |
| P00742 | Coagulation factor X GN = F10 | 1 | | 1 |
| P48740 | Mannan-binding lectin serine protease 1 GN = MASP1 | 1 | | 1 |
| Q8TF72 | Protein Shroom3 GN = SHROOM3 | 1 | | |
| P00488 | Coagulation factor XIII A chain GN = F13A1 | 1 | 3 | 2 |
| P04211 | Ig lambda chain V region 4A | 1 | 1 | 1 |
| Q14161 | ARF GTPase-activating protein GIT2 GN = GIT2 | 1 | 1 | 1 |
| P03952 | Plasma kallikrein GN = KLKB1 | 1 | 1 | |
| O75882 | Attractin GN = ATRN | 1 | | |
| P01743 | Ig heavy chain V-I region HG3 | 1 | | |
| Q06033 | Inter-alpha-trypsin inhibitor heavy chain H3 GN = ITIH3 | 1 | | |
| Q15131 | Cyclin-dependent kinase 10 GN = CDK10 | 1 | | |
| P02652 | Apolipoprotein A-II GN = APOA2 | 1 | | |
| P01814 | Ig heavy chain V-II region OU | 1 | 1 | |
| P23083 | Ig heavy chain V-I region V35 | 1 | 1 | |
| Q5T230 | Undifferentiated embryonic cell transcription factor 1 GN = UTF1 | 1 | 1 | |
| P46821 | Microtubule-associated protein 1B GN = MAP1B | 1 | | 1 |
| O95428 | Papilin GN = PAPLN | 1 | | |
| P01605 | Ig kappa chain V-I region Lay | 1 | | |
| Q6ZRF8 | RING finger protein 207 GN = RNF207 | 1 | | |
| Q5THJ4 | Vacuolar protein sorting-associated protein 13D GN = VPS13D | 1 | | |
| Q8WXF5 | Gamma-crystallin N GN = CRYGN | 1 | | |
| Q96RW7 | Hemicentin-1 GN = HMCN1 | 1 | | |
| Q9Y2P4 | Long-chain fatty acid transport protein 6 GN = SLC27A6 | 1 | | |
| P02751 | Fibronectin GN = FN1 | | 113 | 264 |
| P04275 | von Willebrand factor GN = VWF | | 2 | 99 |
| P07358 | Complement component C8 beta chain GN = C8B | | 14 | 14 |
| Q08380 | Galectin-3-binding protein GN = LGALS3BP | | 2 | 14 |
| P00738 | Haptoglobin GN = HP | | 8 | 7 |
| P07225 | Vitamin K-dependent protein S GN = PROS1 | | 7 | 9 |
| Q16610 | Extracellular matrix protein 1 GN = ECM1 | | 2 | 15 |
| P00739 | Haptoglobin-related protein GN = HPR | | 6 | 9 |
| P18428 | Lipopolysaccharide-binding protein GN = LBP | | 6 | 6 |
| Q14520 | Hyaluronan-binding protein 2 GN = HABP2 | | | 6 |
| Q15485 | Ficolin-2 GN = FCN2 | | | 5 |
| Q7Z794 | Keratin, type II cytoskeletal 1b GN = KRT77 | | | |
| O95445 | Apolipoprotein M GN = APOM | | | 6 |
| P01610 | Ig kappa chain V-I region WEA | | | |
| P02774 | Vitamin D-binding protein GN = GC | | 2 | 2 |
| Q13093 | Platelet-activating factor acetylhydrolase GN = PLA2G7 | | | 5 |
| P01609 | Ig kappa chain V-I region Scw | | 6 | |
| P27918 | Properdin GN = CFP | | | 1 |
| O95445 | Apolipoprotein M GN = APOM | | | |
| P48740 | Mannan-binding lectin serine protease 1 GN = MASP1 | | | |
| P01602 | Ig kappa chain V-I region HK102 (Fragment) GN = IGKV1-5 | | 2 | 2 |
| P00748 | Coagulation factor XII GN = F12 | | | 5 |
| P01009 | Alpha-1-antitrypsin GN = SERPINA1 | | | 1 |
| P05160 | Coagulation factor XIII B chain GN = F13B | | | 1 |
| Q15485 | Ficolin-2 GN = FCN2 | | | |
| Q9UHG3 | Prenylcysteine oxidase 1 GN = PCYOX1 | | | |
| P20851 | C4b-binding protein beta chain GN = C4BPB | | 2 | 1 |
| P04180 | Phosphatidylcholine-sterol acyltransferase GN = LCAT | | | 1 |
| Q86Y46 | Keratin, type II cytoskeletal 73 GN = KRT73 | | | |
| P01769 | Ig heavy chain V-III region GA | | 1 | 3 |
| P04433 | Ig kappa chain V-III region VG (Fragment) | | 1 | 2 |
| P11226 | Mannose-binding protein C GN = MBL2 | | 1 | 2 |
| P13639 | Elongation factor 2 GN = EEF2 | | 1 | |
| O95382 | Mitogen-activated protein kinase kinase kinase 6 GN = MAP3K6 | | 1 | |
| P54756 | Ephrin type-A receptor 5 GN = EPHA5 | | 1 | |
| P55056 | Apolipoprotein C-IV GN = APOC4 | | | 7 |
| P49913 | Cathelicidin antimicrobial peptide GN = CAMP | | | 2 |
| Q9UK55 | Protein Z-dependent protease inhibitor GN = SERPINA10 | | | 2 |
| Q9Y6R7 | IgGFc-binding protein GN = FCGBP | | | 1 |
| Q8NBP7 | Proprotein convertase subtilisin/kexin type 9 GN = PCSK9 | | | 1 |
| Q96IY4 | Carboxypeptidase B2 GN = CPB2 | | | 1 |
| Q9BXR6 | Complement factor H-related protein 5 GN = CFHR5 | | | 1 |
| Q14151 | Scaffold attachment factor B2 GN = SAFB2 | | | |
| Q8TF44 | C2 calcium-dependent domain-containing protein 4C GN = C2CD4C | | | |
| P12259 | Coagulation factor V GN = F5 | | | |
| P49790 | Nuclear pore complex protein Nup153 GN = NUP153 | | | |
| Q86Y38 | Xylosyltransferase 1 GN = XYLT1 | | | |
| Q09472 | Histone acetyltransferase p300 GN = EP300 | | | |
| Q7Z5Y6 | Bone morphogenetic protein 8A GN = BMP8A | | | |
| Q86UW6 | NEDD4-binding protein 2 GN = N4BP2 | | | |
| P19013 | Keratin, type II cytoskeletal 4 GN = KRT4 | | 3 | 6 |
| P08779 | Keratin, type I cytoskeletal 16 GN = KRT16 | | | 9 |
| P01619 | Ig kappa chain V-III region B6 | | 4 | 3 |
| O43790 | Keratin, type II cuticular Hb6 GN = KRT86 | | | |
| P78386 | Keratin, type II cuticular Hb5 GN = KRT85 | | | |
| P04083 | Annexin A1 GN = ANXA1 | | | 1 |
| Q8N1N4 | Keratin, type II cytoskeletal 78 GN = KRT78 | | | |
| P22531 | Small proline-rich protein 2E GN = SPRR2E | | 3 | |
| P10909 | Clusterin GN = CLU | | 2 | |
| Q9UBG3 | Cornulin GN = CRNN | | 1 | 5 |
| Q96PE2 | Rho guanine nucleotide exchange factor 17 GN = ARHGEF17 | | 1 | |
| Q9UBC9 | Small proline-rich protein 3 GN = SPRR3 | | | 1 |
| P02751 | Fibronectin GN = FN1 | | | |
| Q7Z6I6 | Rho GTPase-activating protein 30 GN = ARHGAP30 | | | |
| P63267 | Actin, gamma-enteric smooth muscle GN = ACTG2 | | | |
| Q8IWL2 | Pulmonary surfactant-associated protein A1 GN = SFTPA1 | | | |
| Q99459 | Cell division cycle 5-like protein GN = CDC5L | | | |
| P02751 | Fibronectin GN = FN1 | | 119 | |
| A0M8Q6 | Ig lambda-7 chain C region GN = IGLC7 | | 8 | 7 |
| P20930 | Filaggrin GN = FLG | | 5 | 11 |
| P01009 | Alpha-1-antitrypsin GN = SERPINA1 | | 5 | 3 |
| P01779 | Ig heavy chain V-III region TUR | | 5 | |
| P14923 | Junction plakoglobin GN = JUP | | 4 | |
| P15924 | Desmoplakin GN = DSP | | 4 | |
| P01042 | Kininogen-1 GN = KNG1 | | 3 | |
| Q5T749 | Keratinocyte proline-rich protein GN = KPRP | | 2 | |
| Q5T751 | Late cornified envelope protein 1C GN = LCE1C | | 2 | |
| P06331 | Ig heavy chain V-II region ARH-77 | | 2 | |
| P01624 | Ig kappa chain V-III region POM | | 2 | |
| P23142 | Fibulin-1 GN = FBLN1 | | 1 | |
| P02745 | Complement C1q subcomponent subunit A GN = C1QA | | 1 | 2 |
| O75636 | Ficolin-3 GN = FCN3 | | 1 | 1 |
| P01715 | Ig lambda chain V-IV region Bau | | 1 | 1 |
| P06318 | Ig lambda chain V-VI region WLT | | 1 | 1 |
| Q9H1J1 | Regulator of nonsense transcripts 3A GN = UPF3A | | 1 | 1 |
| P08697 | Alpha-2-antiplasmin GN = SERPINF2 | | 1 | 1 |
| A4UGR9 | Xin actin-binding repeat-containing protein 2 GN = XIRP2 | | 1 | |
| P00751 | Complement factor B GN = CFB | | 1 | |
| P01011 | Alpha-1-antichymotrypsin GN = SERPINA3 | | 1 | |
| Q02413 | Desmoglein-1 GN = DSG1 | | 1 | |
| Q8WZ42 | Titin GN = TTN | | 1 | |
| Q9C099 | Leucine-rich repeat and coiled-coil domain-containing protein 1 | | 1 | |
| | GN = LRRCC1 | | | |
| Q9UKN7 | Unconventional myosin-XV GN = MYO15A | | 1 | |
| O15084 | Serine/threonine-protein phosphatase 6 regulatory ankyrin repeat subunit | | 1 | |
| | A GN = ANKRD28 | | | |
| P01771 | Ig heavy chain V-III region HIL | | 1 | |
| P10721 | Mast/stem cell growth factor receptor Kit GN = KIT | | 1 | |
| P26358 | DNA (cytosine-5)-methyltransferase 1 GN = DNMT1 | | 1 | |
| Q9Y4D7 | Plexin-D1 GN = PLXND1 | | 1 | |
| P01612 | Ig kappa chain V-I region Mev | | 1 | |
| P01880 | Ig delta chain C region GN = IGHD | | 1 | |
| Q8NDN9 | RCC1 and BTB domain-containing protein 1 GN = RCBTB1 | | 1 | |
| Q9HAY6 | Beta,beta-carotene 15,15′monooxygenase GN = BCO1 | | 1 | |
| P04259 | Keratin, type II cytoskeletal 6B GN = KRT6B | | | 10 |
| P13646 | Keratin, type I cytoskeletal 13 GN = KRT13 | | | 5 |
| P06310 | Ig kappa chain V-II region RPMI 6410 | | | 3 |
| P06314 | Ig kappa chain V-IV region B17 | | | 2 |
| P60709 | Actin, cytoplasmic 1 GN = ACTB | | | 2 |
| P02751 | Fibronectin GN = FN1 | | | 2 |
| Q9UL12 | Sarcosine dehydrogenase, mitochondrial GN = SARDH | | | 2 |
| P32189 | Glycerol kinase GN = GK | | | 1 |
| Q5J8M3 | ER membrane protein complex subunit 4 GN = EMC4 | | | 1 |
| Q96HR3 | Mediator of RNA polymerase II transcription subunit 30 GN = MED30 | | | 1 |
| P01833 | Polymeric immunoglobulin receptor GN = PIGR | | | 1 |
| P04792 | Heat shock protein beta-1 GN = HSPB1 | | | 1 |
| P15924 | Desmoplakin GN = DSP | | | 1 |
| Q14D04 | Ventricular zone-expressed PH domain-containing protein homolog 1 | | | 1 |
| | GN = VEPH1 | | | |
| Q96L92 | Sorting nexin-27 GN = SNX27 | | | 1 |
| A6NM62 | Leucine-rich repeat-containing protein 53 GN = LRRC53 | | | 1 |
| A6NMB1 | Sialic acid-binding Ig-like lectin 16 GN = SIGLEC16 | | | 1 |
| P00740 | Coagulation factor IX GN = F9 | | | 1 |
| P01762 | Ig heavy chain V-III region TRO | | | 1 |
| P02656 | Apolipoprotein C-III GN = APOC3 | | | 1 |
| P11388 | DNA topoisomerase 2-alpha GN = TOP2A | | | 1 |
| Q4VC44 | FLYWCH-type zinc finger-containing protein 1 GN = FLYWCH1 | | | 1 |
| Q5JWF8 | Actin-like protein 10 GN = ACTL10 | | | 1 |

### Example 27

### Enrichment of Oligonucleotide Probes to Breast Cancer (BrCa) and Non-BrCa Derived Microvesicles Using a Balanced Library Design

[0938] In this Example, a naïve ADAPT oligonucleotide library was screened to enrich oligonucleotides that identify microvesicles circulating in the blood of breast cancer patients and microvesicles circulating in the blood of healthy, control individuals (i.e., without breast cancer). The input library was the naïve F-TRin-35n-B 8-3s library, which comprises a 5′ region (5′ CTAGCATGACTGCAGTACGT (SEQ ID NO. 152)) followed by the random naïve aptamer sequences of 35 nucleotides and a 3′ region (5′ CTGTCTCTTATACACATCTGACGCTGCCGACGA (SEQ ID NO. 153)). The “balanced” design is described in Example 23 of Int'l Patent Publication WO/2015/031694 (Appl. No. PCT/US2014/053306, filed Aug. 28, 2014). The working library comprised approximately 2×10¹³ synthetic oligonucleotide sequences. The naïve library may be referred to as the “LO Library” herein.

[0939] The LO Library was enriched against fractionated plasma samples from breast cancer patients and from healthy (non-breast cancer) controls using the protocol shown in FIG. 21A. In Step 1, an aliquot of approximately 10¹¹ sequences of PCR-amplified LO was incubated with pooled blood-plasma from 59 breast cancer patients with positive biopsy (represented by “Source A” in FIG. 21A). In parallel, another aliquot of 10¹¹ sequences was incubated with pooled blood-plasma from 30 patients with suspected breast cancer who proved negative on biopsy and 30 self declared healthy women (represented by “Source B” in FIG. 21A). In Step 2, microvesicles (extracellular vesicles, “EV”) were precipitated using ultracentrifugation (UC) from both LO-samples. The EV-associated oligodeoxynucleotides (ODNs) were recovered from the respective pellets. In Step 3, a counter-selection step (Step 3) was carried out by incubation of each enriched library with plasma from the different cohorts to drive the selection pressure towards enrichment of ODNs specifically associated with each sample cohort. In this step, sequences contained in the EV pellets were discarded. In Step 4, a second positive selection was performed. In this step, the sequences contained in the respective supernatants (sn) from Step 3 were mixed with plasma from another aliquot of each positive control sample-population, and EVs were again isolated. EV-associated ODNs were recovered, representing two single-round libraries called library L1 for positive enrichment of cancer (positive biopsy) patients, and library L2 for the positive enrichment against control patients. In a final step, L1 and L2 were amplified by PCR, reverted to single stranded DNA (ssDNA), and mixed to yield library L3.

[0940] This enrichment scheme was iterated two times more using L3 as the input to further reduce the complexity of the profiling library to approximately 10⁶ different sequences. In Step 2, UC was used for partitioning of microvesicles, which may increase the specificity for the EV fraction. In Steps 3 and 4, partitioning was performed using PEG-precipitation. This procedure enriches for ODNs specific for each biological source. Library L3 contains those ODNs that are associated with targets characteristic for EV-populations from both sources, i.e. ODNs acting as aptamers that bind to molecules preferentially expressed in each source. A total of biopsy-positive (n=59), biopsy-negative (n=30), and self-declared normal (n=30) were used in the first round of L3 enrichment, while only the cancer and non-cancer samples were used in the subsequent rounds.

[0941] The enriched libraries were characterized using next-generation-sequencing (NGS) to measure copy numbers of sequences contained in each profiling library. NGS of L0 shows that the vast majority of sequences existed in low copy numbers, whereas libraries L1 and L2 showed significantly higher average counts per sequence (FIG. 21B) and a reduced amount of different sequences, with unaltered total valid reads, (FIG. 21C) consistent with an enrichment process.

### Example 28

### Analysis of ADAPT-Identified Biomarkers

[0942] As described herein, e.g., in the section entitled “Aptamer Target Identification,” an unknown target recognized by an aptamer can be identified. In this Example, an oligonucleotide probe library (also referred to as Adaptive Dynamic Artificial Poly-ligand Targeting (ADAPT) libraries or Topographical Oligonucleotide Probe “TOP” libraries) was developed as described here and targets of the screened oligonucleotides were determined. This Example used a ADAPT library generated by enriching microvesicles collected from the blood of breast cancer patients and normal controls (i.e., non-cancer individuals). The enrichment protocols are described above in Example 27.

[0943] Materials & Methods

[0944] SBED Library Conjugation

[0945] A naïve F-TRin-35n-B 8-3s library was enriched against microvesicles from normal female plasma. The naïve unenriched library comprised a 5′ region (5′ CTAGCATGACTGCAGTACGT (SEQ ID NO. 152)) followed by the random naïve aptamer sequences of 35 nucleotides and a 3′ region (5′ CTGTCTCTTATACACATCTGACGCTGCCGACGA (SEQ ID NO. 153)). The naïve library may be referred to as the “L0 Library” herein and the enriched library referred to as the “L2 library.” See Example 27. The screened library was PCR amplified with a C6-amine sense primer (C6 Amine-5′ CTAGCATGACTGCAGTACGT 3′ (SEQ ID NO. 152)) and a 5′ phosphorylated anti-sense primer (5′ Phos TCGTCGGCAGCGTCA (SEQ ID NO. 7947)), the purified product was strand separated and conjugated with sulfo-SBED (Thermo Scientific) according to Vinkenborg et al. (Angew Chem Int Ed Engl. 2012, 51:9176-80) with the following modifications: The reaction was scaled down to 5 μg C6-amine DNA library (8.6 μM) in 25 mM HEPES-KOH, 0.1M NaCl, pH 8.3 and incubated with either 100-fold molar excess of sulfo-SBED or DMSO in a 21 μL volume for 30 min at room temp in the dark. The SBED-conjugated library was immediately separated from the unconjugated library and free sulfo-SBED by injection onto a Waters X-Bridge™ OST C-18 column (4.6 mm×50 mm) and fractionated by HPLC (Agilent 1260 Infinity) with a linear gradient Buffer A: 100 mM TEAA, pH7.0, 0% ACN to 100 mM TEAA, pH7.0, 25% ACN at 0.2 ml/min, 65° C. There SBED-conjugated fractions were desalted into water with Glen Gel-Pak™ Cartridges and concentrated by speed-vac. SBED conjugation was confirmed by LC-MS and/or a dot blot with streptavidin-HRP detection.

[0946] Binding Reaction and Cross-Linking

[0947] SBED library functionalization was tested by performing the ADAPT assay with SBED vs DMSO mock conjugated control C6-amine library and sequenced on a HiSeq 2500™ (Illumina) as described herein. See, e.g., Example 20. The aptamer precipitation was performed with forty-eight ADAPT reactions incubated for lhr with end-over-end rotation at room temp with a 5ng input of SBED conjugated library per 200 μL of plasma (pre-spun to remove cellular debris at 10,000×g for 20 min, 4° C.) in 1× PBS, 3 mM MgCl₂, 0.01 mM dextran sulfate, 40 ng/μl salmon sperm DNA and 40 ng/μl yeast transfer RNA, and cOmplete ULTRA Mini EDTA-free™ protease inhibitors (Roche) equivalent to ˜240 ng library and 9.6 mls plasma. A duplicate set of 48 reactions was prepared with the DMSO control C6-amine library. Aptamer library-protein complexes were precipitated with incubation in 6% PEG8000 for 15 min at 4° C. then centrifuged at 10,000×g for 5 min. Pellets were washed with 1 ml 1× PBS, 3 mM MgCl2 by gentle inversion to remove unbound aptamers. The washed pellets were resuspended in 100 μL of water and subjected to photo-cross-linking at 365 nm with a hand-held 3UV (254 NM/302 NM/365 NM) lamp, 115 volts (Thermo Scientific) for 10 min on ice with 1-2 cm between the 96-well plate and lamp.

[0948] Oligonucleotide Precipitation

[0949] Cross-linked reactions were subsequently pooled (˜4.8 ml) per library or 4.8 ml of 1× PBS (AP bead only control) and incubated with 10 μL of Prepared Dynabeads® MyOne™ Streptavidin C1 (10 mg/ml) (Life Technologies) (pre-washed with 1× PBS, 0.01% Triton X-100) shaking for 1 hr at room temp. Beads were transferred to an eppendorf tube and lysed for 20 min with lysis buffer (50 mM Tris-HCl, 10 mM MgCl2, 200 mM NaCl, 0.5% Triton X-100, 5% glycerol, pH 7.5) on ice, washed 3 times with wash buffer 1 (10 mM Tris-HCl, 1 mM EDTA, 2M NaCl, 1% Triton X-100), followed by 2 times with wash buffer 2 (10 mM Tris-HCl, 1 mM EDTA, 2M NaCl, 0.01% Triton X-100) as described by Vinkenborg et al. (Angew Chem Int Ed Engl. 2012, 51:9176-80). Cross-linked proteins were eluted by boiling 15 min in 1× LDS sample buffer with reducing agent added (Life Technologies) and loaded on a 4-12% SDS-PAGE gradient gel (Life Technology). Proteins and DNA were detected with double staining with Imperial Blue Protein Stain (Thermo Scientific) followed by Prot-SIL2™ silver stain kit (Sigma) used according to manufacturer's instructions in order to enhance sensitivity and reduce background.

[0950] Protein Identification

[0951] Protein bands that appeared to differ between the cancer and normal were excised from the gradient gels and subjected to liquid chromatography-tandem mass spectrometry (LC-MS/MS).

[0952] Results

[0953] FIG. 18A shows the identification of ADAPT protein targets on a silver stained SDS-PAGE gel. Aptamer-SBED protein complexes (lane 3) or Aptamer-DMSO protein complexes (control-lane 4) were precipitated with 6% PEG8000, subjected to UV photo-cross-linking, and pulled-down with Streptavidin coated beads. Eluate was analyzed under reducing conditions by SDS-PAGE and silver staining. Aptamer library alone (5 ng) (lane 1) was loaded as a control for migration of the library (second to bottom arrows) and an equal volume of eluate from a bead only sample (lane 4) was loaded as a streptavidin control to control for potential leaching of the streptavidin monomer (bottom arrow) under the harsh elution conditions. Upper arrows (“Targets”) indicate specific or more predominant bands identified with the SBED-conjugated library vs. the mock DMSO treated control C6-amine library. Indicated target protein bands were cut out and sent for LC-MS/MS protein identification or indicated DNA library bands were eluted, reamplified and sequenced. The identified proteins are those that appeared as upregulated in the normal samples.

[0954] Tables 23-30 list human proteins that were identified in 8 bands excised from the gel in FIG. 18A. In all tables the proteins are those identified in the oligo-SBED protein complexes (lane 3) with proteins identified in the corresponding control lane 4 removed. The band numbers in the tables are indicated in FIG. 18A. Accession numbers in the table are from the UniProt database (www.uniprot.org). “GN=” is followed by the gene name. Various protein classifications indicated in the Tables 23-30 include Nucleic Acid Binding Proteins (NAB), Tumor suppressors (TS), cell adhesion/cytoskeletal (CA/CK) and abundant plasma proteins (ABP).

TABLE 23
Band 3

| Accession | | |
|---|---|---|
| number | Class | Protein name |
| P02538 | CA/CK | Keratin, type II cytoskeletal 6A GN = KRT6A |
| P15924 | CA/CK | Desmoplakin GN = DSP |
| P04259 | CA/CK | Keratin, type II cytoskeletal 6B GN = KRT6B |
| P60709 | CA/CK | Actin, cytoplasmic 1 GN = ACTB |
| P20930 | CA/CK | Filaggrin GN = FLG |
| P07476 | CA/CK | Involucrin GN = IVL |
| P31947 | TS | 14-3-3 protein sigma GN = SFN |
| Q7Z794 | CA/CK | Keratin, type II cytoskeletal 1b GN = KRT77 |
| P02545 | NAB | Prelamin-A/C GN = LMNA |
| P19012 | CA/CK | Keratin, type I cytoskeletal 15 GN = KRT15 |
| P47929 | CA/CK | Galectin-7 GN = LGALS7 |
| | & TS | |
| P11142 | | Heat shock cognate 71 kDa protein GN = HSPA8 |
| P58107 | NAB | Epiplakin GN = EPPK1 |
| P08107 | | Heat shock 70 kDa protein 1A/1B GN = HSPA1A |
| Q02413 | CA/CK | Desmoglein-1 GN = DSG1 |
| P06396 | CA/CK | Gelsolin GN = GSN |
| O60814 | NAB | Histone H2B type 1-K GN = HIST1H2BK |
| P68104 | NAB | Elongation factor 1-alpha 1 GN = EEF1A1 |
| P05387 | NAB | 60S acidic ribosomal protein P2 GN = RPLP2 |
| Q7RTS7 | CA/CK | Keratin, type II cytoskeletal 74 GN = KRT74 |
| P31946 | TS | 14-3-3 protein beta/alpha GN = YWHAB |
| Q13835 | CA/CK | Plakophilin-1 GN = PKP1 |
| P14923 | CA/CK | Junction plakoglobin GN = JUP |
| P09651 | NAB | Heterogeneous nuclear ribonucleoprotein A1 GN = HNRNPA1 |
| P07900 | | Heat shock protein HSP 90-alpha GN = HSP90AA1 |
| Q96KK5 | NAB | Histone H2A type 1-H GN = HIST1H2AH |
| P04406- | CA/CK | Glyceraldehyde-3-phosphate dehydrogenase GN = GAPDH |
| P10412 | NAB | Histone H1.4 GN = HIST1H1E |
| P04792 | | Heat shock protein beta-1 GN = HSPB1 |
| Q9NZT1 | | Calmodulin-like protein 5 GN = CALML5 |
| P81605 | | Dermcidin GN = DCD |
| P27348 | TS | 14-3-3 protein theta GN = YWHAQ |
| P55072 | NAB | Transitional endoplasmic reticulum ATPase GN = VCP |
| Q09666 | NAB | Neuroblast differentiation-associated protein AHNAK GN = AHNAK |
| P23246 | NAB | Splicing factor, proline- and glutamine-rich GN = SFPQ |
| Q15149 | CA/CK | Plectin GN = PLEC |
| Q8NC51 | NAB | Plasminogen activator inhibitor 1 RNA-binding protein GN = SERBP1 |
| P07237 | | Protein disulfide-isomerase GN = P4HB |
| O60437 | CA/CK | Periplakin GN = PPL |
| P01717 | ABP | Ig lambda chain V-IV region Hil |
| P55884 | NAB | Eukaryotic translation initiation factor 3 subunit B GN = EIF3B |
| P11021 | | 78 kDa glucose-regulated protein GN = HSPA5 |
| P01024 | | Complement C3 GN = C3 |
| P04350 | CA/CK | Tubulin beta-4A chain GN = TUBB4A |
| P01857 | ABP | Ig gamma-1 chain C region GN = IGHG1 |
| P61247 | NAB | 40S ribosomal protein S3a GN = RPS3A |
| P62937 | | Peptidyl-prolyl cis-trans isomerase A GN = PPIA |
| O15020 | CA/CK | Spectrin beta chain, non-erythrocytic 2 GN = SPTBN2 |
| P30101 | | Protein disulfide-isomerase A3 GN = PDIA3 |
| Q6KB66 | CA/CK | Keratin, type II cytoskeletal 80 GN = KRT80 |
| Q9UJU6 | CA/CK | Drebrin-like protein GN = DBNL |
| P47914 | NAB | 60S ribosomal protein L29 GN = RPL29 |
| P39023 | NAB | 60S ribosomal protein L3 GN = RPL3 |
| A6NMY6 | CA/CK | Putative annexin A2-like protein GN = ANXA2P2 |
| P60174 | CA/CK | Triosephosphate isomerase GN = TPI1 |
| P35241 | CA/CK | Radixin GN = RDX |
| P07305 | NAB | Histone H1.0 GN = H1F0 |
| P15259 | CA/CK | Phosphoglycerate mutase 2 GN = PGAM2 |
| P0CG05 | ABP | Ig lambda-2 chain C regions GN = IGLC2 |
| Q92817 | CA/CK | Envoplakin GN = EVPL |
| P06733 | NAB | MBP-1 of Alpha-enolase GN = ENO1 |
| P22626 | NAB | Heterogeneous nuclear ribonucleoproteins A2/B1 GN = HNRNPA2B1 |
| P62424 | NAB | 60S ribosomal protein L7a GN = RPL7A |
| P60660 | CA/CK | Myosin light polypeptide 6 GN = MYL6 |
| P04083 | NAB | Annexin A1 GN = ANXA1 |
| Q14134 | NAB | Tripartite motif-containing protein 29 GN = TRIM29 |
| P39019 | NAB | 40S ribosomal protein S19 GN = RPS19 |
| Q8WVV4 | CA/CK | Protein POF1B GN = POF1B |
| Q02878 | NAB | 60S ribosomal protein L6 GN = RPL6 |
| Q9Y6X9 | NAB | MORC family CW-type zinc finger protein 2 GN = MORC2 |
| Q9NQC3 | NAB | Reticulon-4 GN = RTN4 |
| Q5T753 | CA/CK | Late cornified envelope protein 1E GN = CA/CK E |

TABLE 24
Band 9

| Accession | | |
|---|---|---|
| number | Class | Protein name |
| P61626 | | Lysozyme C GN = LYZ |
| Q9HCK1 | NAB | DBF4-type zinc finger-containing protein 2 |
| | | GN = ZDBF2 |

TABLE 25
Band 1

| Accession | | |
|---|---|---|
| number | Class | Protein name |
| P01834 | ABP | Ig kappa chain C region GN = IGKC |
| P01765 | ABP | Ig heavy chain V-III region TIL |
| P04003 | NAB | C4b-binding protein alpha chain GN = C4BPA |
| P60709 | CA/CK | Actin, cytoplasmic 1 GN = ACTB |
| Q5T751 | CA/CK | Late cornified envelope protein 1C GN = LCE1C |

TABLE 26
Band 5

| Accession | | |
|---|---|---|
| number | Class | Protein name |
| P01860 | ABP | Ig gamma-3 chain C region GN = IGHG3 |
| O60902 | NAB | Short stature homeobox protein 2 GN = SHOX2 |

TABLE 27
Band 7

| Accession | | |
|---|---|---|
| number | Class | Protein name |
| Q04695 | CA/CK | Keratin, type I cytoskeletal 17 GN = KRT17 |
| Q7Z794 | CA/CK | Keratin, type II cytoskeletal 1b GN = KRT77 |
| Q6KB66 | CA/CK | Keratin, type II cytoskeletal 80 GN = KRT80 |
| P01833 | | Polymeric immunoglobulin receptor GN = PIGR |
| P01042 | | Kininogen-1 GN = KNG1 |
| Q02413 | CA/CK | Desmoglein-1 GN = DSG1 |
| P15924 | CA/CK | Desmoplakin GN = DSP |
| Q8TF72 | | Protein Shroom3 GN = SHROOM3 |
| P02671 | ABP | Fibrinogen alpha chain GN = FGA |
| Q5T749 | CA/CK | Keratinocyte proline-rich protein GN = KPRP |
| Q5VZP5 | | Inactive dual specificity phosphatase 27 |
| | | GN = DUSP27 |
| Q5T751 | CA/CK | Late cornified envelope protein 1C GN = LCE1C |
| Q9UL12 | | Sarcosine dehydrogenase, mitochondrial |
| | | GN = SARDH |
| P00698 | | Lysozyme C OS = Gallus gallus GN = LYZ |
| Q8N114 | | Protein shisa-5 GN = SHISA5 |

TABLE 28
Band 15

| Accession | | |
|---|---|---|
| number | Class | Protein name |
| P08238 | | Heat shock protein HSP 90-beta GN = HSP90AB1 |
| P68104 | NAB | Elongation factor 1-alpha 1 GN = EEF1A1 |
| P02675 | ABP | Fibrinogen beta chain GN = FGB |
| Q8TF72 | | Protein Shroom3 GN = SHROOM3 |
| P0CG05 | ABP | Ig lambda-2 chain C regions GN = IGLC2 |
| P78386 | CA/CK | Keratin, type II cuticular Hb5 GN = KRT85 |
| Q7Z5Y6 | | Bone morphogenetic protein 8A GN = BMP8A |
| O14633 | CA/CK | Late cornified envelope protein 2B GN = LCE2B |

TABLE 29
Band 17

| Accession | | |
|---|---|---|
| number | Class | Protein name |
| P02538 | CA/CK | Keratin, type II cytoskeletal 6A GN = KRT6A |
| P01834 | ABP | Ig kappa chain C region GN = IGKC |
| P06702 | | Protein S100-A9 GN = S100A9 |
| P68104 | NAB | Elongation factor 1-alpha 1 GN = EEF1A1 |
| P01024 | | Complement C3 GN = C3 |
| P81605 | | Dermcidin GN = DCD |
| P05109 | | Protein S100-A8 GN = S100A8 |
| Q5T751 | CA/CK | Late cornified envelope protein 1C GN = LCE1C |

TABLE 30
Band 19

| Accession | | |
|---|---|---|
| number | Class | Protein name |
| P02768 | NAB | Serum albumin GN = ALB |
| P0CG05 | ABP | Ig lambda-2 chain C regions GN = IGLC2 |
| P06702 | | Protein S100-A9 GN = S100A9 |
| P08238 | | Heat shock protein HSP 90-beta GN = HSP90AB1 |
| P60709 | CA/CK | Actin, cytoplasmic 1 GN = ACTB |
| P13647 | CA/CK | Keratin, type II cytoskeletal 5 GN = KRT5 |
| P01616 | ABP | Ig kappa chain V-II region MIL |
| Q86YZ3 | CA/CK | Hornerin GN = HRNR |
| P01857 | ABP | Ig gamma-1 chain C region GN = IGHG1 |
| P62805 | NAB | Histone H4 GN = HIST1H4A |
| P59665 | | Neutrophil defensin 1 GN = DEFA1 |
| P61626 | | Lysozyme C GN = LYZ |
| P01024 | ABP | Complement C3 GN = C3 |
| Q8TF72 | | Protein Shroom3 GN = SHROOM3 |
| P83593 | ABP | Ig kappa chain V-IV region STH (Fragment) |
| P01700 | ABP | Ig lambda chain V-I region HA |
| P01877 | ABP | Ig alpha-2 chain C region GN = IGHA2 |
| Q9UL12 | | Sarcosine dehydrogenase, mitochondrial |
| | | GN = SARDH |
| Q6NXT2 | NAB | Histone H3.3C GN = H3F3C |
| P02788 | NAB | Lactotransferrin GN = LTF |
| P02787 | ABP | Serotransferrin GN = TF |

[0955] Certain proteins were identified in multiple bands. For example, IGLC2 was identified in bands 3, 15 and 19 and SHROOM3 was identified in bands 7, 15, 19. This may be due to degradation products, isoforms or the like. These experiments identified 108 proteins (plus 2 lysozyme controls), comprising among others 34 Nucleic Acid Binding Proteins (NAB) where 7 of the 34 are putative tumor suppressors/repressors; 37 cell adhesion/cytoskeletal (CA/CK); and 14 abundant plasma proteins (ABP). All of the tumor suppressors/repressors are DNA/RNA binding proteins. Other proteins comprise chaperones, signaling molecules etc.

[0956] For comparison to the above pull-down results with the enriched L2 library, mass spectrometry was used to identify proteins in whole plasma samples (“neat plasma”) (Table 31), in PEG enriched plasma fractions (comprising a microvesicle-containing fraction) (Table 32), and in L0 library pull-down (Table 33) using the same healthy (non-breast cancer) plasma samples as described above. Accession numbers in the tables are from the UniProt database (www.uniprot.org). “GN=” is followed by the gene name. Tables 31 and 32 are similar to columns “Whole Plasma” and “PEG ppt” in Table 22, respectively, with the exception that the input healthy sample pools were derived from a different patient cohort. 81 proteins were pulled down by L2 (Tables 23-30) that were not detectable in the PEG-precipitated and neat plasma, indicating that these proteins became enriched due to their interaction with L2 oligonucleotide probes. The overlap in proteins in the L0 and L2 pull-down experiments is shown in FIG. 18B. The subset of proteins associated with L0 and L2, respectively, was then analyzed by gene ontology (GO) cellular component enrichment (geneontology.org). FIG. 18C only shows classifications of identified proteins by L2 and L0 pull-down that have a p-value smaller than 6×10⁻¹². L2 was able to bind and pull-down specific proteins, indicating that the oligonucleotide enriched in this library exhibit specific binding to target proteins. Moreover, GO categories “Molecular Function” (FIG. 18E) and “Biological Process” (FIG. 18D) identified proteins enriched for specific GO terms in L2 pull-down samples not detectable in the L0 pull-down. For example, L2 specifically enriched for nucleic acid binding proteins.

TABLE 31
Proteins identified in neat plasma

| Accession | Description |
|---|---|
| P02768 | Serum albumin GN = ALB |
| P01024 | Complement C3 GN = C3 |
| P04114 | Apolipoprotein B-100 GN = APOB |
| P02787 | Serotransferrin GN = TF |
| P01023 | Alpha-2-macroglobulin GN = A2M |
| P0C0L5 | Complement C4-B GN = C4B |
| P0C0L4 | Complement C4-A GN = C4A |
| P02671 | Fibrinogen alpha chain GN = FGA |
| P02675 | Fibrinogen beta chain GN = FGB |
| P00450 | Ceruloplasmin GN = CP |
| P01834 | Ig kappa chain C region GN = IGKC |
| P01857 | Ig gamma-1 chain C region GN = IGHG1 |
| P00738 | Haptoglobin GN = HP |
| P02679 | Fibrinogen gamma chain GN = FGG |
| P01860 | Ig gamma-3 chain C region GN = IGHG3 |
| P08603 | Complement factor H GN = CFH |
| P02774 | Vitamin D-binding protein GN = GC |
| P01859 | Ig gamma-2 chain C region GN = IGHG2 |
| P01009 | Alpha-1-antitrypsin GN = SERPINA1 |
| Q14624 | Inter-alpha-trypsin inhibitor heavy chain H4 GN = ITIH4 |
| P01008 | Antithrombin-III GN = SERPINC1 |
| P01871 | Ig mu chain C region GN = IGHM |
| P00739 | Haptoglobin-related protein GN = HPR |
| P00751 | Complement factor B GN = CFB |
| P02647 | Apolipoprotein A-I GN = APOA1 |
| P02751 | Fibronectin GN = FN1 |
| B9A064 | Immunoglobulin lambda-like polypeptide 5 GN = IGLL5 |
| P00747 | Plasminogen GN = PLG |
| P04217 | Alpha-1B-glycoprotein GN = A1BG |
| P19823 | Inter-alpha-trypsin inhibitor heavy chain H2 GN = ITIH2 |
| P01011 | Alpha-1-antichymotrypsin GN = SERPINA3 |
| P01042 | Kininogen-1 GN = KNG1 |
| P01861 | Ig gamma-4 chain C region GN = IGHG4 |
| P06727 | Apolipoprotein A-IV GN = APOA4 |
| P00734 | Prothrombin GN = F2 |
| P02790 | Hemopexin GN = HPX |
| P04003 | C4b-binding protein alpha chain GN = C4BPA |
| P04220 | Ig mu heavy chain disease protein |
| P19827 | Inter-alpha-trypsin inhibitor heavy chain H1 GN = ITIH1 |
| P01876 | Ig alpha-1 chain C region GN = IGHA1 |
| P0CG05 | Ig lambda-2 chain C regions GN = IGLC2 |
| P05155 | Plasma protease C1 inhibitor GN = SERPING1 |
| P06396 | Gelsolin GN = GSN |
| P01598 | Ig kappa chain V-I region EU |
| P01597 | Ig kappa chain V-I region DEE |
| P27169 | Serum paraoxonase/arylesterase 1 GN = PON1 |
| P01019 | Angiotensinogen GN = AGT |
| P01613 | Ig kappa chain V-I region Ni |
| P02749 | Beta-2-glycoprotein 1 GN = APOH |
| P04196 | Histidine-rich glycoprotein GN = HRG |
| P02743 | Serum amyloid P-component GN = APCS |
| P43652 | Afamin GN = AFM |
| P01877 | Ig alpha-2 chain C region GN = IGHA2 |
| P02649 | Apolipoprotein E GN = APOE |
| P02765 | Alpha-2-HS-glycoprotein GN = AHSG |
| P05546 | Heparin cofactor 2 GN = SERPIND1 |
| P01031 | Complement C5 GN = C5 |
| P01611 | Ig kappa chain V-I region Wes |
| P02760 | Protein AMBP GN = AMBP |
| P02763 | Alpha-1-acid glycoprotein 1 GN = ORM1 |
| P01766 | Ig heavy chain V-III region BRO |
| P25311 | Zinc-alpha-2-glycoprotein GN = AZGP1 |
| P01764 | Ig heavy chain V-III region VH26 |
| P04264 | Keratin, type II cytoskeletal 1 GN = KRT1 |
| P05156 | Complement factor I GN = CFI |
| P01619 | Ig kappa chain V-III region B6 |
| P18135 | Ig kappa chain V-III region HAH |
| P68871 | Hemoglobin subunit beta GN = HBB |
| O43866 | CD5 antigen-like GN = CD5L |
| P02748 | Complement component C9 GN = C9 |
| P02753 | Retinol-binding protein 4 GN = RBP4 |
| P04004 | Vitronectin GN = VTN |
| P08185 | Corticosteroid-binding globulin GN = SERPINA6 |
| P08697 | Alpha-2-antiplasmin GN = SERPINF2 |
| P10909 | Clusterin GN = CLU |
| P35908 | Keratin, type II cytoskeletal 2 epidermal GN = KRT2 |
| P02747 | Complement C1q subcomponent subunit C GN = C1QC |
| P02766 | Transthyretin GN = TTR |
| P01617 | Ig kappa chain V-II region TEW |
| P01767 | Ig heavy chain V-III region BUT |
| P01779 | Ig heavy chain V-III region TUR |
| P02652 | Apolipoprotein A-II GN = APOA2 |
| P19652 | Alpha-1-acid glycoprotein 2 GN = ORM2 |
| Q03591 | Complement factor H-related protein 1 GN = CFHR1 |
| Q96PD5 | N-acetylmuramoyl-L-alanine amidase GN = PGLYRP2 |
| P00698 | Lysozyme C OS = Gallus gallus GN = LYZ |
| P01625 | Ig kappa chain V-IV region Len |
| P01781 | Ig heavy chain V-III region GAL |
| P01880 | Ig delta chain C region GN = IGHD |
| P02746 | Complement C1q subcomponent subunit B GN = C1QB |
| P07357 | Complement component C8 alpha chain GN = C8A |
| P07360 | Complement component C8 gamma chain GN = C8G |
| P13645 | Keratin, type I cytoskeletal 10 GN = KRT10 |
| O14791 | Apolipoprotein L1 GN = APOL1 |
| P01591 | Immunoglobulin J chain GN = IGJ |
| P03952 | Plasma kallikrein GN = KLKB1 |
| P04211 | Ig lambda chain V region 4A |
| P04433 | Ig kappa chain V-III region VG (Fragment) |
| P69905 | Hemoglobin subunit alpha GN = HBA1 |
| O95445 | Apolipoprotein M GN = APOM |
| P00736 | Complement C1r subcomponent GN = C1R |
| P00748 | Coagulation factor XII GN = F12 |
| P01714 | Ig lambda chain V-III region SH |
| P01717 | Ig lambda chain V-IV region Hil |
| P01763 | Ig heavy chain V-III region WEA |
| P01825 | Ig heavy chain V-II region NEWM |
| P02750 | Leucine-rich alpha-2-glycoprotein GN = LRG1 |
| P04208 | Ig lambda chain V-I region WAH |
| P06310 | Ig kappa chain V-II region RPMI 6410 |
| P06312 | Ig kappa chain V-IV region (Fragment) GN = IGKV4-1 |
| P07225 | Vitamin K-dependent protein S GN = PROS1 |
| P07477 | Trypsin-1 GN = PRSS1 |
| P10643 | Complement component C7 GN = C7 |
| P13671 | Complement component C6 GN = C6 |
| P22792 | Carboxypeptidase N subunit 2 GN = CPN2 |
| P36955 | Pigment epithelium-derived factor GN = SERPINF1 |
| P80748 | Ig lambda chain V-III region LOI |
| Q8NE71 | ATP-binding cassette sub-family F member 1 GN = ABCF1 |
| O75636 | Ficolin-3 GN = FCN3 |
| P00742 | Coagulation factor X GN = F10 |
| P01743 | Ig heavy chain V-I region HG3 |
| P01771 | Ig heavy chain V-III region HIL |
| P01814 | Ig heavy chain V-II region OU |
| P04430 | Ig kappa chain V-I region BAN |
| P05090 | Apolipoprotein D GN = APOD |
| P06681 | Complement C2 GN = C2 |
| P07358 | Complement component C8 beta chain GN = C8B |
| P08519 | Apolipoprotein(a) GN = LPA |
| P09871 | Complement C1s subcomponent GN = C1S |
| P16402 | Histone H1.3 GN = HIST1H1D |
| P23083 | Ig heavy chain V-I region V35 |
| Q08380 | Galectin-3-binding protein GN = LGALS3BP |
| Q6VMQ6 | Activating transcription factor 7-interacting protein 1 GN = ATF7IP |
| Q6ZTQ3 | Ras association domain-containing protein 6 GN = RASSF6 |
| Q8NCE2 | Myotubularin-related protein 14 GN = MTMR14 |
| Q96JQ0 | Protocadherin-16 GN = DCHS1 |
| Q96KK5 | Histone H2A type 1-H GN = HIST1H2AH |
| Q96RW7 | Hemicentin-1 GN = HMCN1 |
| Q9H1J1 | Regulator of nonsense transcripts 3A GN = UPF3A |
| A0M8Q6 | Ig lambda-7 chain C region GN = IGLC7 |
| O14795 | Protein unc-13 homolog B GN = UNC13B |
| O96018 | Amyloid beta A4 precursor protein-binding family A member 3 GN = APBA3 |
| P01620 | Ig kappa chain V-III region SIE |
| P01768 | Ig heavy chain V-III region CAM |
| P06331 | Ig heavy chain V-II region ARH-77 |
| P06396 | Gelsolin GN = GSN |
| P0C0L4 | Complement C4-A GN = C4A |
| P20742 | Pregnancy zone protein GN = PZP |
| P29622 | Kallistatin GN = SERPINA4 |
| P34897 | Serine hydroxymethyltransferase, mitochondrial GN = SHMT2 |
| P35527 | Keratin, type I cytoskeletal 9 GN = KRT9 |
| P49908 | Selenoprotein P GN = SEPP1 |
| P83436 | Conserved oligomeric Golgi complex subunit 7 GN = COG7 |
| Q06033 | Inter-alpha-trypsin inhibitor heavy chain H3 GN = ITIH3 |
| Q66K66 | Transmembrane protein 198 GN = TMEM198 |
| P00488 | Coagulation factor XIII A chain GN = F13A1 |
| P01605 | Ig kappa chain V-I region Lay |
| P06703 | Protein S100-A6 GN = S100A6 |
| P13647 | Keratin, type II cytoskeletal 5 GN = KRT5 |
| P19022 | Cadherin-2 GN = CDH2 |
| P35542 | Serum amyloid A-4 protein GN = SAA4 |
| P48443 | Retinoic acid receptor RXR-gamma GN = RXRG |
| Q5TH69 | Brefeldin A-inhibited guanine nucleotide-exchange protein 3 GN = ARFGEF3 |
| Q6IPM2 | IQ domain-containing protein E GN = IQCE |
| Q86XI8 | Uncharacterized protein C19orf68 GN = C19orf68 |
| Q9NYQ7 | Cadherin EGF LAG seven-pass G-type receptor 3 GN = CELSR3 |
| Q9NZP8 | Complement C1r subcomponent-like protein GN = C1RL |
| Q9UL12 | Sarcosine dehydrogenase, mitochondrial GN = SARDH |
| Q9Y623 | Myosin-4 GN = MYH4 |

TABLE 32
Proteins identified in PEG precipitate from plasma

| Accession | Description |
|---|---|
| P01024 | Complement C3 GN = C3 |
| P01023 | Alpha-2-macroglobulin GN = A2M |
| P04114 | Apolipoprotein B-100 GN = APOB |
| P01834 | Ig kappa chain C region GN = IGKC |
| P0C0L4 | Complement C4-A GN = C4A |
| P0C0L5 | Complement C4-B GN = C4B |
| P02675 | Fibrinogen beta chain GN = FGB |
| P02768 | Serum albumin GN = ALB |
| P08603 | Complement factor H GN = CFH |
| P01857 | Ig gamma-1 chain C region GN = IGHG1 |
| P02671 | Fibrinogen alpha chain GN = FGA |
| P02751 | Fibronectin GN = FN1 |
| P00747 | Plasminogen GN = PLG |
| P01871 | Ig mu chain C region GN = IGHM |
| P02679 | Fibrinogen gamma chain GN = FGG |
| P02787 | Serotransferrin GN = TF |
| P01031 | Complement C5 GN = C5 |
| P00450 | Ceruloplasmin GN = CP |
| P01859 | Ig gamma-2 chain C region GN = IGHG2 |
| P0CG05 | Ig lambda-2 chain C regions GN = IGLC2 |
| P04220 | Ig mu heavy chain disease protein |
| P19827 | Inter-alpha-trypsin inhibitor heavy chain H1 GN = ITIH1 |
| P20742 | Pregnancy zone protein GN = PZP |
| P01860 | Ig gamma-3 chain C region GN = IGHG3 |
| B9A064 | Immunoglobulin lambda-like polypeptide 5 GN = IGLL5 |
| P00738 | Haptoglobin GN = HP |
| P04003 | C4b-binding protein alpha chain GN = C4BPA |
| P19823 | Inter-alpha-trypsin inhibitor heavy chain H2 GN = ITIH2 |
| P01876 | Ig alpha-1 chain C region GN = IGHA1 |
| P04264 | Keratin, type II cytoskeletal 1 GN = KRT1 |
| P13645 | Keratin, type I cytoskeletal 10 GN = KRT10 |
| P02649 | Apolipoprotein E GN = APOE |
| P01597 | Ig kappa chain V-I region DEE |
| P02760 | Protein AMBP GN = AMBP |
| P00734 | Prothrombin GN = F2 |
| P10643 | Complement component C7 GN = C7 |
| P13671 | Complement component C6 GN = C6 |
| Q14624 | Inter-alpha-trypsin inhibitor heavy chain H4 GN = ITIH4 |
| P00751 | Complement factor B GN = CFB |
| P01861 | Ig gamma-4 chain C region GN = IGHG4 |
| P02749 | Beta-2-glycoprotein 1 GN = APOH |
| P02647 | Apolipoprotein A-I GN = APOA1 |
| O43866 | CD5 antigen-like GN = CD5L |
| P00736 | Complement C1r subcomponent GN = C1R |
| P00739 | Haptoglobin-related protein GN = HPR |
| P01609 | Ig kappa chain V-I region Scw |
| P01877 | Ig alpha-2 chain C region GN = IGHA2 |
| Q03591 | Complement factor H-related protein 1 GN = CFHR1 |
| P35908 | Keratin, type II cytoskeletal 2 epidermal GN = KRT2 |
| P01620 | Ig kappa chain V-III region SIE |
| P04196 | Histidine-rich glycoprotein GN = HRG |
| P01766 | Ig heavy chain V-III region BRO |
| P02746 | Complement C1q subcomponent subunit B GN = C1QB |
| P02774 | Vitamin D-binding protein GN = GC |
| P01765 | Ig heavy chain V-III region TIL |
| P01621 | Ig kappa chain V-III region NG9 (Fragment) |
| P01767 | Ig heavy chain V-III region BUT |
| P01779 | Ig heavy chain V-III region TUR |
| P02748 | Complement component C9 GN = C9 |
| P05546 | Heparin cofactor 2 GN = SERPIND1 |
| P01610 | Ig kappa chain V-I region WEA |
| P01613 | Ig kappa chain V-I region Ni |
| P01625 | Ig kappa chain V-IV region Len |
| P01598 | Ig kappa chain V-I region EU |
| P01617 | Ig kappa chain V-II region TEW |
| P01781 | Ig heavy chain V-III region GAL |
| P01042 | Kininogen-1 GN = KNG1 |
| P04004 | Vitronectin GN = VTN |
| P07358 | Complement component C8 beta chain GN = C8B |
| P80748 | Ig lambda chain V-III region LOI |
| P01825 | Ig heavy chain V-II region NEWM |
| P02743 | Serum amyloid P-component GN = APCS |
| P03952 | Plasma kallikrein GN = KLKB1 |
| P05156 | Complement factor I GN = CFI |
| P07225 | Vitamin K-dependent protein S GN = PROS1 |
| P08519 | Apolipoprotein(a) GN = LPA |
| P35527 | Keratin, type I cytoskeletal 9 GN = KRT9 |
| P01009 | Alpha-1-antitrypsin GN = SERPINA1 |
| P01714 | Ig lambda chain V-III region SH |
| P07357 | Complement component C8 alpha chain GN = C8A |
| P01619 | Ig kappa chain V-III region B6 |
| P01717 | Ig lambda chain V-IV region Hil |
| P04207 | Ig kappa chain V-III region CLL |
| P09871 | Complement C1s subcomponent GN = C1S |
| O75636 | Ficolin-3 GN = FCN3 |
| P01008 | Antithrombin-III GN = SERPINC1 |
| P01612 | Ig kappa chain V-I region Mev |
| P01880 | Ig delta chain C region GN = IGHD |
| P02747 | Complement C1q subcomponent subunit C GN = C1QC |
| P02790 | Hemopexin GN = HPX |
| P07360 | Complement component C8 gamma chain GN = C8G |
| P01602 | Ig kappa chain V-I region HK102 (Fragment) GN = IGKV1-5 |
| P01611 | Ig kappa chain V-I region Wes |
| P01763 | Ig heavy chain V-III region WEA |
| P04217 | Alpha-1B-glycoprotein GN = A1BG |
| P06396 | Gelsolin GN = GSN |
| P23142 | Fibulin-1 GN = FBLN1 |
| P68871 | Hemoglobin subunit beta GN = HBB |
| Q06033 | Inter-alpha-trypsin inhibitor heavy chain H3 GN = ITIH3 |
| P00748 | Coagulation factor XII GN = F12 |
| P01011 | Alpha-1-antichymotrypsin GN = SERPINA3 |
| P02656 | Apolipoprotein C-III GN = APOC3 |
| P04430 | Ig kappa chain V-I region BAN |
| P04434 | Ig kappa chain V-III region VH (Fragment) |
| P05160 | Coagulation factor XIII B chain GN = F13B |
| P06312 | Ig kappa chain V-IV region (Fragment) GN = IGKV4-1 |
| P08697 | Alpha-2-antiplasmin GN = SERPINF2 |
| P10909 | Clusterin GN = CLU |
| P16402 | Histone H1.3 GN = HIST1H1D |
| P27169 | Serum paraoxonase/arylesterase 1 GN = PON1 |
| P01591 | Immunoglobulin J chain GN = IGJ |
| P01624 | Ig kappa chain V-III region POM |
| P01768 | Ig heavy chain V-III region CAM |
| P01773 | Ig heavy chain V-III region BUR |
| P04433 | Ig kappa chain V-III region VG (Fragment) |
| P05090 | Apolipoprotein D GN = APOD |
| P06889 | Ig lambda chain V-IV region MOL |
| P80419 | Ig heavy chain V-III region GAR |
| Q9Y6R7 | IgGFc-binding protein GN = FCGBP |
| O95445 | Apolipoprotein M GN = APOM |
| P00488 | Coagulation factor XIII A chain GN = F13A1 |
| P01743 | Ig heavy chain V-I region HG3 |
| P02745 | Complement C1q subcomponent subunit A GN = C1QA |
| P06318 | Ig lambda chain V-VI region WLT |
| P06681 | Complement C2 GN = C2 |
| P20851 | C4b-binding protein beta chain GN = C4BPB |
| P27918 | Properdin GN = CFP |
| P29622 | Kallistatin GN = SERPINA4 |
| P35542 | Serum amyloid A-4 protein GN = SAA4 |
| P36955 | Pigment epithelium-derived factor GN = SERPINF1 |
| Q08380 | Galectin-3-binding protein GN = LGALS3BP |
| Q14520 | Hyaluronan-binding protein 2 GN = HABP2 |
| Q8NDN9 | RCC1 and BTB domain-containing protein 1 GN = RCBTB1 |
| O14791 | Apolipoprotein L1 GN = APOL1 |
| O43526 | Potassium voltage-gated channel subfamily KQT member 2 GN = KCNQ2 |
| P00740 | Coagulation factor IX GN = F9 |
| P01762 | Ig heavy chain V-III region TRO |
| P01771 | Ig heavy chain V-III region HIL |
| P01814 | Ig heavy chain V-II region OU |
| P02652 | Apolipoprotein A-II GN = APOA2 |
| P03951 | Coagulation factor XI GN = F11 |
| P04208 | Ig lambda chain V-I region WAH |
| P04211 | Ig lambda chain V region 4A |
| P06310 | Ig kappa chain V-II region RPMI 6410 |
| P06311 | Ig kappa chain V-III region IARC/BL41 |
| P13647 | Keratin, type II cytoskeletal 5 GN = KRT5 |
| P15814 | Immunoglobulin lambda-like polypeptide 1 GN = IGLL1 |
| P23083 | Ig heavy chain V-I region V35 |
| P69905 | Hemoglobin subunit alpha GN = HBA1 |
| Q15848 | Adiponectin GN = ADIPOQ |
| Q96PD5 | N-acetylmuramoyl-L-alanine amidase GN = PGLYRP2 |
| Q9H1J1 | Regulator of nonsense transcripts 3A GN = UPF3A |
| Q9HAY6 | Beta,beta-carotene 15,15′-monooxygenase GN = BCO1 |
| Q9NP61 | ADP-ribosylation factor GTPase-activating protein 3 GN = ARFGAP3 |
| Q9UL12 | Sarcosine dehydrogenase, mitochondrial GN = SARDH |
| P01009 | Alpha-1-antitrypsin GN = SERPINA1 |
| P01042 | Kininogen-1 GN = KNG1 |
| P01604 | Ig kappa chain V-I region Kue |
| P01605 | Ig kappa chain V-I region Lay |
| P01606 | Ig kappa chain V-I region OU |
| P01616 | Ig kappa chain V-II region MIL |
| P01764 | Ig heavy chain V-III region VH26 |
| P01769 | Ig heavy chain V-III region GA |
| P027510 | Fibronectin GN = FN1 |
| P02766 | Transthyretin GN = TTR |
| P05155 | Plasma protease C1 inhibitor GN = SERPING1 |
| P06727 | Apolipoprotein A-IV GN = APOA4 |
| P07477 | Trypsin-1 GN = PRSS1 |
| P08133 | Annexin A6 GN = ANXA6 |
| P13569 | Cystic fibrosis transmembrane conductance regulator GN = CFTR |
| P18428 | Lipopolysaccharide-binding protein GN = LBP |
| P23142 | Fibulin-1 GN = FBLN1 |
| Q6Q759 | Sperm-associated antigen 17 GN = SPAG17 |
| Q96JY6 | PDZ and LIM domain protein 2 GN = PDLIM2 |
| Q96PE2 | Rho guanine nucleotide exchange factor 17 GN = ARHGEF17 |
| A0M8Q6 | Ig lambda-7 chain C region GN = IGLC7 |
| O00468 | Agrin GN = AGRN |
| P01019 | Angiotensinogen GN = AGT |
| P02753 | Retinol-binding protein 4 GN = RBP4 |
| P02765 | Alpha-2-HS-glycoprotein GN = AHSG |
| P04206 | Ig kappa chain V-III region GOL |
| P05154 | Plasma serine protease inhibitor GN = SERPINA5 |
| P06396 | Gelsolin GN = GSN |
| P18135 | Ig kappa chain V-III region HAH |
| P36980 | Complement factor H-related protein 2 GN = CFHR2 |
| Q141611 | ARF GTPase-activating protein GIT2 GN = GIT2 |
| Q9NQS7 | Inner centromere protein GN = INCENP |

TABLE 33
Proteins identified with unenriched library L0 pull-down

| Accession | Description |
|---|---|
| P00698 | Lysozyme C OS = Gallus gallus GN = LYZ |
| P01857 | Ig gamma-1 chain C region GN = IGHG1 |
| P02533 | Keratin, type I cytoskeletal 14 GN = KRT14 |
| P02538 | Keratin, type II cytoskeletal 6A GN = KRT6A |
| P02647 | Apolipoprotein A-I GN = APOA1 |
| P02671 | Fibrinogen alpha chain GN = FGA |
| P02768 | Serum albumin GN = ALB |
| P04792 | Heat shock protein beta-1 GN = HSPB1 |
| P08123 | Collagen alpha-2(I) chain GN = COL1A2 |
| P08779 | Keratin, type I cytoskeletal 16 GN = KRT16 |
| P0CF74 | Ig lambda-6 chain C region GN = IGLC6 |
| P13647 | Keratin, type II cytoskeletal 5 GN = KRT5 |
| P15924 | Desmoplakin GN = DSP |
| P15924 | Desmoplakin GN = DSP |
| P47929 | Galectin-7 GN = LGALS7 |
| P63267 | Actin, gamma-enteric smooth muscle GN = ACTG2 |
| P81605 | Dermcidin GN = DCD |
| Q02413 | Desmoglein-1 GN = DSG1 |
| Q5D862 | Filaggrin-2 GN = FLG2 |
| Q6UWP8 | Suprabasin GN = SBSN |
| Q86Y46 | Keratin, type II cytoskeletal 73 GN = KRT73 |
| Q86YZ3 | Hornerin GN = HRNR |
| Q8N1N4 | Keratin, type II cytoskeletal 78 GN = KRT78 |
| Q8TF72 | Protein Shroom3 GN = SHROOM3 |
| Q9BQ50 | Three prime repair exonuclease 2 GN = TREX2 |
| Q9P0W8 | Spermatogenesis-associated protein 7 GN = SPATA7 |

[0957] The methods above were further repeated to identify proteins that were identified in cancer samples using pull-down with the L1 library. Table 34 lists proteins that were identified in these experiments. Accession numbers in the table are from the UniProt database (www.uniprot.org). “GN=” is followed by the gene name.

TABLE 34
Proteins identified in cancer samples

| Accession | Description |
|---|---|
| Q9HC84 | Mucin-5B GN = MUC5B |
| Q01469 | Fatty acid-binding protein, epidermal GN = FABP5 |
| P02790 | Hemopexin GN = HPX |
| P00450 | Ceruloplasmin GN = CP |
| P22531 | Small proline-rich protein 2E GN = SPRR2E |
| P22532 | Small proline-rich protein 2D GN = SPRR2D |
| Q08499-7 | cAMP-specific 3′,5′-cyclic phosphodiesterase 4D |
| | GN = PDE4D |
| P02774-2 | Vitamin D-binding protein GN = GC |
| O75976 | Carboxypeptidase D GN = CPD |
| P08571 | Monocyte differentiation antigen CD14 GN = CD14 |
| P28838-2 | Cytosol aminopeptidase GN = LAP3 |
| P43652 | Afamin GN = AFM |
| Q15485-2 | Ficolin-2 GN = FCN2 |
| Q9UGM3-9 | Deleted in malignant brain tumors 1 protein GN = DMBT1 |
| P42702 | Leukemia inhibitory factor receptor GN = LIFR |
| Q96L92-3 | Sorting nexin-27 GN = SNX27 |
| P31025 | Lipocalin-1 GN = LCN1 |
| P53367-2 | Arfaptin-1 GN = ARFIP1 |
| P02749 | Beta-2-glycoprotein 1 GN = APOH |
| P03952 | Plasma kallikrein GN = KLKB1 |
| Q5T750 | Skin-specific protein 32 GN = XP32 |
| Q71UI9-5 | Histone H2A.V GN = H2AFV |
| O95678 | Keratin, type II cytoskeletal 75 GN = KRT75 |
| P48668 | Keratin, type II cytoskeletal 6C GN = KRT6C |
| P78385 | Keratin, type II cuticular Hb3 GN = KRT83 |
| Q01546 | Keratin, type II cytoskeletal 2 oral GN = KRT76 |
| Q14525 | Keratin, type I cuticular Ha3-II GN = KRT33B |
| Q14CN4-3 | Keratin, type II cytoskeletal 72 GN = KRT72 |
| Q15323 | Keratin, type I cuticular Ha1 GN = KRT31 |
| Q86Y46-2 | Keratin, type II cytoskeletal 73 GN = KRT73 |
| Q02413-2 | Desmoglein-1 GN = DSG1 |
| Q5T751 | Late cornified envelope protein 1C GN = LCE1C |
| Q5T7P2 | Late cornified envelope protein 1A GN = LCE1A |
| P00751 | Complement factor B GN = CFB |
| P08603 | Complement factor H GN = CFH |
| P01009-2 | Alpha-1-antitrypsin GN = SERPINA1 |
| P01598 | Ig kappa chain V-I region EU |
| P01616 | Ig kappa chain V-II region MIL |
| P01715 | Ig lambda chain V-IV region Bau |
| P01781 | Ig heavy chain V-III region GAL |
| P0CF74 | Ig lambda-6 chain C region GN = IGLC6 |
| P63267-2 | Actin, gamma-enteric smooth muscle GN = ACTG2 |

### Example 29

### Identification of Biomarkers through Affinity Enrichment with an Enriched Oligonucleotide Library and Mass Spectrometry

[0958] This Example continues upon the Example above. Identification of protein-protein and nucleic acid-protein complexes by affinity purification mass spectrometry (AP-MS) can be hampered in samples comprising complex mixtures of biological components (e.g., bodily fluids including without limitation blood and derivatives thereof). For example, it may be desireable to detect low abundance protein and nucleic acid-protein complexes in a complex milieu comprising various components that may interact promiscuously with specific binding sites such as high abundance proteins that interact non-specifically with the affinity resin. AP-MS has been used previously to enrich for pre-identified targets of interest using individual DNA or RNA aptamers or specific nucleic acid binding domains. In this Example, an enriched oligonucleotide probing library was used as the affinity reagent. This approach combined with mass spectrometry enables the identification of differentially expressed biomarker from different disease states or cellular perturbations without relying on a priori knowledge of the targets of interest. Such biomarker may comprise proteins, nucleic acids, miRNA, mRNA, carbohydrates, lipid targets, combinations thereof, or other components in a biological system.

[0959] The method comprises identification of an enriched oligonucleotide probe library according to the methods of the invention followed by target identification with affinity purification of the bound probing library and mass spectrometry. The members of the enriched oligonucleotide probing library comprise an affinity tag. A biological sample is probed with the oligonucleotide probe library, affinity purification of the oligonucleotide probe library via the affinity tag is performed which will accordingly purify biological entities in complex with various members of the probe library, and read-out of targets that purified with the members of the probe library is performed using liquid chromatography-tandem mass spectrometry (LC-MS/MS) for proteins or oligonucleotide targets (e.g., miRNA or mRNA) with next generation sequencing (NGS). Confirmation of protein targets is performed using quantitative mass spectrometry (MS), e.g., using MRM/SRM or SWATH based methods.

[0960] The method of the Example lends itself to various options. For example, any appropriate affinity tags can be used for affinity pull-down, including without limitation anti-sense oligonucleotides, biotin, polyhistidine, FLAG octapeptide (i.e., N-DYKDDDDK-C (SEQ ID NO. 7948)), where N stands for Amino-terminus and C stands for Carboxy terminus), 3× FLAG, Human influenza hemagglutinin (HA)-tag (i.e., N-YPYDVPDYA-C (SEQ ID NO. 7949)), myc-tag (N-EQKLISEEDL-C (SEQ ID NO. 7950)), other such as known in the art, and combinations thereof. Similarly, any appropriate enrichment support can be used in addition to the magnetic streptavidin beads exemplified herein, including without limitation other bead systems, agarose beads, planar arrays or column chromatography supports. It follows that the various supports can be coupled with the various affinity reagents appropriate for the oligonucleotide library, including without limitation streptavidin, avidin, anti-His tag antibodies, nickel, and the like. The different affinity tags and supports can be combined as desired. This Example used cross-linking but in certain cases such cross-linking is not necessary and may even be undesirable, e.g., to favor identification of high affinity complex formation. When cross-linking is desired, any appropriate cross-linkers can be used to carry out the invention, including BS2G, DSS, formaldehyde, and the like. Other appropriate cross-linkers and methods are described herein. See, e.g., Section “Aptamer Target Identification.” Lysis buffers and wash stringencies can be varied, e.g, depending on whether complexes are cross-linked or not. Less stringent lysis/wash conditions may produce a wider array of potential protein complexes of interest whereas more stringent lysis/wash conditions may favor higher affinity oligo-target complexes and/or targets comprising specific proteins (e.g., by disassociating larger complexes bound to the oligos). One of skill will further appreciate that qualitative and/or quantitative LC-MS/MS may be used for target detection and verification. Similarly, metabolic labeling and label-free approaches may be used for quantitative MS, including without limitation spectral counting, SILAC, dimethyl labeling, TMT labeling, Targeted MS with SRM/MRM or SWATH, and the like.

[0961] References:

[0962] Vickenborg et al. “Aptamer based affinity labeling of proteins”, Angew Chem Int. 51(36):9176-80 (2012).

[0963] Tacheny, M, Arnould, T., Renard, A. “Mass spectrometry-based identification of proteins interacting with nucleic acids” Journal of Proteomics 94; 89-109 (2013).

[0964] Faoro C and Ataide S F. “Ribonomic approaches to study the RNA-binding proteome.” FEBS Lett. 588(20):3649-64 (2014).

[0965] Budayeva H G, Cristea, I M, “A mass spectrometry view of stable and transient protein inteeractions.” Adv Exp Med Biol. 806:263-82 (2014).

### Example 30

### Protocol for Affinity Capture Using Oligonucleotide Probing Library

[0966] This Example presents a detailed protocol for the method of affinity capture using an oligonucleotide probing library presented in the Example above.

[0967] Protocol:

[0968] The oligonucleotide probe library comprises F-TRin-35n-B-8-3s described herein either desthiobiotin labeled or unlabeled library and binding to normal (i.e., non-cancer) female plasma. The oligonucleotide probe library is enriched against the plasma samples as described elsewhere (e.g., Example 27). The plasma samples are processed separately against the desthiobiotin labeled or unlabeled oligonucleotide libraries. General parameters included the following:

[0969] 48 normal plasma samples are pooled for enrichment of each oligonucleotide library (Desthiobiotin or Unlabeled)

[0970] 200 μl input plasma per sample

[0971] Ultracentrifugation (UC) is used to pre-clear the samples

[0972] 5 ng of each aptamer library is added to each sample

[0973] Binding competitors for all library samples include 0.01×51 (dextran sulfate), 340 ng for tRNA and 340 ng Salmon sperm DNA as described elsewhere herein.

[0974] 6% PEG 8000 is used for precipitation of microvesicles within the samples

[0975] Affinity purification is performed with C1 Streptavidin beads (MyOne Strptavidin Beads C1-65001, lot 2 ml (10 mg/ml))

[0976] Buffers:

[0977] Plasma dilution: 6 mM MgCl2 in 2× PBS

[0978] Pellet Wash Buffer: 1× PBS, 3 mM MgCl2

[0979] PEG Ppt Buffer: 20% Peg8000 in 1× PBS, 3 mM MgCl2

[0980] Bead Prep Buffer: 1× PBS containing 0.01% Triton X-100

[0981] Lysis Buffer: prepare a 2× stock solution consisting of 100 mM Tris-HCl, 20 mM MgCl2, 400 mM NaCl, 1% Triton X-100, 10% glycerol, pH 7.5. Diluted to 1× with water 1:1 prior to using.

[0982] AP Wash buffer 1: 10 mM Tris-HCl, 1 mM EDTA, 2M NaCl, 1% Triton X-100, pH 7.5

[0983] AP wash buffer 2: 10 mM Tris-HCL, 1 mM EDTA, 2M NaCl, 0.01% Triton X-100, pH 7.5

[0984] Biotin Elution buffer 1: 5 mM Biotin, 20 mM Tris, 50 mM NaCl, pH 7.5

[0985] 1× LDS, 1× Reducing buffer 2

[0986] Reagent/Instrument Prep:

[0987] Pre-chill Ultracentrifuge to 4° C.

[0988] Protease inhibition: dissolve 2 tablets of “cOmplete ULTRA MINI EDTA-free EASYpack” protease inhibitor in 1100 μl of H2O (20× stock of protease inhibitor).

[0989] Plasma Preparation (for Each of Desthiobiotin or Unlabeled Oligonucleotide Libraries):

[0990] 1. Add 50 μl of protease inhibitor to each ml of sample (on top of frozen plasma) in a room temperature (RT) water bath. Will use 22 mls of pooled plasma, so 1100 μl inhibitor.

[0991] 2. To remove cell/debris, spin samples at 7500×g 20 min, 4° C. in the Ultracentrifuge.

[0992] 3. Collect the supernatant, pool and measure volume & record.

[0993] 4. Add an equal volume of 2× PBS, 6 mM MgCl₂ to the plasma.

[0994] 5. Label low-retention eppendorf tubes 1-96.

[0995] 6. Transfer 400 μl of each sample to eppendorf tubes based on appropriate tube map

[0996] 7. Using an electronic P200, add competitors: 8.6 μl of 40 ng/μl Salmon sperm DNA; 8.6 μl of 40 ng/μl tRNA; 8.6 μl of 0.5×S1.

[0997] 8. Incubate at RT with end over end rotation for 10 min.

[0998] 9. Add 10 μL of appropriate oligo library, mix well. Save any leftover diluted library for gel control (see below).

[0999] 10. Incubate 1 hr at RT with end over end rotation.

[1000] 11. Using an electronic repeat P100, add 187 μl of 20% PEG 8000 to sample for a final 6% concentration to the 435.5 μl of sample/oligo library. Invert a few times to mix and incubate for 15 min at 4° C.

[1001] 12. Spin each sample in table top centrifuge at 10,000×g for 5 min.

[1002] 13. Remove supernatant and discard, add 1 ml 1× PBS, 3mM MgCl₂ to pellet.

[1003] 14. Wash pellet by gentle inversion

[1004] 15. Remove buffer, re-suspend pellets in 100 μl 1× PBS, 3mM MgCl₂: incubate at RT for 10 min on mixmate @900 rpm to re-suspend. Make sure each sample is well re-suspended by pipetting.

[1005] 16. Pool all desthiobiotin library samples into one 50 ml falcon tube, and the unlabeled library into another, total volume for each should be 4800 μl.

[1006] 17. Take 10 μL aliquot for the input into AP sample for gel (add 10 μL of 2× LDS buffer w/2× reducing agent.

[1007] Affinity Purification:

[1008] 18. Prepare 10 μL of MyOne Strep-coated Magnetic beads per each condition into a 1.5 ml eppendorf tube and place on a magnetic bead rack. Have a Bead only control as well (n=3)

[1009] 19. Remove supernatant and wash 1×500 μl with Bead buffer.

[1010] 20. Discard supernatant

[1011] 21. Resuspend beads in an equal volume of 1× PBS, 3 mM MgCl₂ (equal vol to what was taken out originally=10 μl)

[1012] 22. Add the 10 μl of beads directly to the 4780 μL from step 19. To Bead only control add PBS.

[1013] 23. Incubate samples with streptavidin beads 1 hr RT on plate shaker (taped).

[1014] 24. Place on the large magnetic stand for 1 min and remove supernatant

[1015] 25. Add 1.5 mL of 1× lysis buffer to the samples (do 3×500 μl with a good rinse of the 50 mL falcon tube for each to collect all the beads) and transfer to a new set of eppendorf tubes.

[1016] 26. Incubate for 20 min on ice.

[1017] 27. Place tubes in magnetic bead rack, let equilibrate 1 min and remove the supernatant.

[1018] 28. Wash the beads with wash buffer #1 via vortexing. Resuspend well.

[1019] 29. Place tubes on magnetic bead rack, let equilibrate 1 min and remove the supernatant

[1020] 30. Wash 2 additional times as with wash buffer #1 steps 27-29 (total 3 washes with wash buffer #1)

[1021] 31. Repeat steps 27-29 (2) additional times with wash buffer #2

[1022] 32. During the last wash transfer beads to a new eppendorf tube. (to reduce non-specific binding)

[1023] 33. Do one dry spin to make sure all residual wash buffer is removed.

[1024] 34. Add 10 μl of Biotin Elution buffer 1 to beads

[1025] 35. Incubate for 15 minutes at 37° C.

[1026] 36. Place on magnetic stand for 1 min, collect sup and transfer to a new tube, add 10 μL of 2× LDS, 2× Reducing agent to eluted sample. Save as Elution #1.

[1027] 37. Add 10 μl of 1× LDS Sample Buffer, 1× Reducing buffer to magnetic beads.

[1028] 38. Boil the samples for 15 min at 90° C. The boiling time is 15 minutes to essure the streptavidin on the beads unfolds and releases the biotinylated aptapmer-protein complex.

[1029] 39. Place samples on magnetic stand on ice and collect the eluted sample. This is Elution #2. Discard the beads.

[1030] 40. Gel 1 layout:

[1031] Lane 1: 5 ng Desthiobiotin library

[1032] Lane 2: 1× LDS

[1033] Lane 3: Marker

[1034] Lane 4: Desthiobiotin Elution #1

[1035] Lane 5: Unlabeled Elution #1

[1036] Lane 6: Bead only Elution #1

[1037] Lane 7: Desthiobiotin Elution #2

[1038] Lane 8: Unlabeled Elution #2

[1039] Lane 9: Bead only Elution #2

[1040] Lane 10: Input for AP (saved from step 17)

[1041] Running Reducing SDS Gel:

[1042] Prepare 1× MOPS SDS Running Buffer from 20× MOPS SDS Buffer

[1043] Use 10 or 12 well 4-12% Bis Tris gel

[1044] Peel off tape seal and place in the gel box. Insert spacer for second gel cassette if needed

[1045] Fill the inside/upper chamber with running buffer MOPS (1×) and 500 ul Antioxidant

[1046] Remove the comb carefully, not disturbing the wells

[1047] Rinse the wells with the running buffer to remove the storage buffer which can interfere with sample running

[1048] Slowly load samples to each well carefully using L-20 tip

[1049] Fill the outer/lower chamber with approximately 600 ml of running buffer MOPS (1×)

[1050] Place top portion of unit and secure correct electrodes

[1051] Run the gel to migrate proteins

[1052] 100 V constant for samples to move through stack (until all samples line up) for 15 min

[1053] Increase to 150 V constant for running (until visible sample buffer comes to bottom) for ˜1 hr

[1054] At the end of the run, stop the power supply and remove the gel cassettes from cell

[1055] Disassemble the gel cassette by with gel knife.

[1056] Remove one side of cassette case. Trim off the gel foot and wells (avoid drying gel).

[1057] Transfer gel into container filled with Mili Q water and perform a quick wash.

[1058] Silver Staining:

[1059] Materials:

[1060] ProteoSilver™ Silver Stain Kit, Sigma Catalog No. PROT-SIL1, Lot No. SLBJ0252V

[1061] Ethanol, Fisher Scientific Catalog No. BP2818-4, Lot No. 142224

[1062] Acetic acid, Acros organics Catalog No. 14893-0025, Lot No. B0520036

[1063] Water, Sigma Catalog No. W4502, Lot No. RNBD1581

[1064] Preparation:

[1065] 1. Fixing solution. Add 50 ml of ethanol and 10 ml of acetic acid to 40 ml of ultrapure water.

[1066] 2. 30% Ethanol solution. Add 30 ml of ethanol to 70 ml of ultrapure water.

[1067] 3. Sensitizer solution. Add 1 ml of ProteoSilver Sensitizer to 99 ml of ultrapure water. The prepared solution should be used within 2 hours. A precipitate may form in the ProteoSilver Sensitizer. This precipitate will not affect the performance of the solution. Simply allow the precipitate to settle and remove 1 ml of the supernatant.

[1068] 4. Silver solution. Add 1 ml of ProteoSilver Silver Solution to 99 ml of ultrapure water. The prepared solution should be used within 2 hours.

[1069] 5. Developer solution. Add 5 ml ProteoSilver Developer 1 and 0.1 ml ProteoSilver Developer 2 to 95 ml of ultrapure water. The developer solution should be prepared immediately (<20 minutes) before use.

[1070] 6. All steps should be carried out in the hood and waste needs to be collected in toxic designated container.

[1071] Procedure

[1072] A. Direct Silver Staining

[1073] All steps are carried out at room temperature on an orbital shaker at 60 to 70 rpm.

[1074] 1. Fixing—After electrophoresis of the proteins in the mini polyacrylamide gel, place the gel into a clean tray with 100 ml of the Fixing solution overnight in the hood. Cover tightly.

[1075] 2. Ethanol wash—Decant the Fixing solution and wash the gel for 10 minutes with 100 ml of the 30% Ethanol solution.

[1076] 3. Water wash—Decant the 30% Ethanol solution and wash the gel for 10 minutes with 200 ml of ultrapure water.

[1077] 4. Sensitization—Decant the water and incubate the gel for 10 minutes with 100 ml of the Sensitizer solution.

[1078] 5. Water wash—Decant the Sensitizer solution and wash the gel twice, each time for 10 minutes with 200 ml of ultrapure water.

[1079] 7. Silver equilibration—Decant the water and equilibrate the gel for 10 minutes with 100 ml of the Silver solution.

[1080] 8. Water wash—Decant the Silver solution and wash the gel for 1 to 1.5 minutes with 200 ml of ultrapure water.

[1081] 9. Gel development—Decant the water and develop the gel with 100 ml of the Developer solution. Development times of 3 to 7 minutes are sufficient to produce the desired staining intensity for most gels. Development times as long as 10 to 12 minutes may be required to detect bands or spots with very low protein concentrations (0.1 ng/mm2)

[1082] 10. Stop—Add 5 ml of the ProteoSilver Stop Solution to the developer solution to stop the developing reaction and incubate for 5 minutes. Bubbles of CO₂ gas will form in the mixture.

[1083] 11. Storage—Decant the Developer/Stop solution and wash the gel for 15 minutes with 200 ml of ultrapure water. Store the gel in fresh, ultrapure water and take picture for documentation.

[1084] Protein Identification

[1085] Protein bands of interest were excised from the gradient gels and subjected to liquid chromatography-tandem mass spectrometry (LC-MS/MS) as above.

[1086] Although preferred embodiments of the present invention have been shown and described herein, it will be obvious to those skilled in the art that such embodiments are provided by way of example only. Numerous variations, changes, and substitutions will now occur to those skilled in the art without departing from the invention. It should be understood that various alternatives to the embodiments of the invention described herein may be employed in practicing the invention. It is intended that the following claims define the scope of the invention and that methods and structures within the scope of these claims and their equivalents be covered thereby.

What is claimed is:

1. An oligonucleotide comprising an anti-miR complementary sequence according to any one of SEQ ID NO. 2765-5352 or an anti-miR mismatch sequence selected from SEQ ID NO. 5353-7940.

2. The oligonucleotide of claim 2, wherein the oligonucleotide is surrounded by at least one flanking sequence.

3. An oligonucleotide comprising a sequence 5′-CTAGCATGACTGCAGTACGT [spacer] [anti-miR] CTGTCTCTTATACACATCTGACGCTGCCGACGA-3′, wherein the spacer comprises at least one nucleotide and wherein the [anti-miR] sequence is complementary to a microRNA.

4. The oligonucleotide of claim 3, wherein the spacer is according Table 20 or Table 21.

5. The oligonucleotide of claim 3, wherein the anti-miR sequence comprises an anti-miR complementary sequence according to any one of SEQ ID NO. 2765-5352 or an anti-miR mismatch sequence selected from SEQ ID NO. 5353-7940.

6. An oligonucleotide comprising a sequence 5′ GATCTCCTGTCATCTCACCT [anti-miR] TGTAGAACCATGTCGTCAGTGT 3′, wherein the [anti-miR] sequence is complementary to a microRNA.

7. The oligonucleotide of claim 6, wherein the anti-miR sequence comprises an anti-miR complementary sequence according to any one of SEQ ID NO. 2765-5352 or an anti-miR mismatch sequence selected from SEQ ID NO. 5353-7940.

8. An oligonucleotide that is at least 50, 55, 60, 65, 70, 75, 80, 85, 90, 95, 96, 97, 98, 99 or 100 percent homologous to an oligonucleotide sequence according to any preceding claim.

9. A plurality of oligonucleotides comprising at least 1, 2, 3, 4, 5, 6, 7, 8, 9, 10, 11, 12, 13, 14, 15, 16, 17, 18, 19, 20, 25, 30, 40, 45, 50, 55, 60, 65, 70, 75, 80, 85, 90, 95, 100, 125, 150, 175, 200, 300, 400, 500, 600, 700, 800, 900, 1000, 2000, 3000, 4000, 5000, 6000, 7000, 8000, 9000, or at least 10000 different oligonucleotide sequences according to any preceding claim.

10. A plurality of oligonucleotides comprising a nucleic acid sequence or a portion thereof that is at least 50, 55, 60, 65, 70, 75, 80, 85, 90, 95, 96, 97, 98, 99 or 100 percent homologous to an oligonucleotide according to any preceding claim.

11. An oligonucleotide or plurality of oligonucleotides according to any preceding claim, wherein the oligonucleotide or plurality of oligonucleotides comprises DNA and/or RNA.

12. An oligonucleotide or plurality of oligonucleotides according to any preceding claim, wherein the oligonucleotide or plurality of oligonucleotides comprises at least one functional modification selected from the group consisting of biotinylation, a non-naturally occurring nucleotide, a deletion, an insertion, an addition, and a chemical modification.

13. A composition comprising an oligonucleotide or plurality of oligonucleotides according to any preceding claim, and further comprising a buffer.

14. A method of detecting at least one microRNA-protein complex in a sample comprising:
(a) contacting the sample with at least one oligonucleotide capable of binding a microRNA in a complex between the microRNA and a protein molecule, wherein optionally the at least one oligonucleotide is according to any one of claims 1-8;
(b) identifying cleavage of the at least one oligonucleotide in the contacted sample, thereby detecting the at least one microRNA-protein complex in the sample.

15. The method of claim 14, wherein the at least one oligonucleotide comprises a 5′ flanking region, a core region configured 5′ of the flanking region, and a 3′ flanking region configured 5′ of the core region.

16. The method of claim 15, wherein the at least one oligonucleotide is configured to be cleaved within the core region by a protein component of the at least one microRNA-protein complex if the oligonucleotide is complementary to the microRNA component of the at least one microRNA-protein complex.

17. The method of any one of claims 14-16 wherein the microRNA is a human microRNA.

18. The method of claim 17, wherein the microRNA comprises let-7a, miR-16, miR-21 or miR-92a.

19. The method of any one of claims 14-18, wherein the protein comprises a nucleic acid binding protein, an Argonaute protein, Ago2, Ago 1, Ago3 or Ago 4.

20. The method of claim 19, further comprising addition of a chelating agent prior to the contacting step and addition of magnesium after the contacting step.

21. The method of any one of claims 14-20, wherein the cleavage of the at least one oligonucleotide is identified by detecting cleaved and/or non-cleaved products of the at least one oligonucleotide.

22. The method of claim 21, wherein the cleaved and/or non-cleaved products are detected by sequencing, amplification or hybridization.

23. The method of claim 22, wherein the detection by hybridization comprises contacting the cleaved and/or non-cleaved products with at least one labeled probe that is configured to hybridize with at least one cleaved and/or non-cleaved product.

24. The method of claim 23, wherein the label comprises a fluorescent label.

25. The method of claim 22, wherein the detection by hybridization comprises detecting hybridization to a planar array or particle array.

26. The method of claim 20, wherein the cleaved and/or non-cleaved products are detected by size.

27. The method of claim 26, wherein the size is determined via gel electrophoresis or chromatography.

28. The method of claim 20, wherein the cleaved and/or non-cleaved products are detected by sequencing.

29. The method of claim 28, wherein the sequencing comprises next generation sequencing, dye termination sequencing and/or pyrosequencing.

30. The method of claim 20, wherein the cleaved and/or non-cleaved products are detected using a label.

31. The method of claim 30, wherein the 5′ end of the at least one oligonucleotide carries a fluorescent label and the 3′ end of the oligonucleotide carries a fluorescent quencher.

32. The method of claim 30, wherein the 3′ end of the at least one oligonucleotide carries a fluorescent label and the 5′ end of the oligonucleotide carries a fluorescent quencher.

33. The method of claim 31 or 32, wherein the fluorescent label is detectable upon cleavage of the at least one oligonucleotide by the protein component of the at least one microRNA-protein complex.

34. The method of any one of claims 14-33, wherein the microRNA-protein complex is associated with a microvesicle in the sample.

35. The method of claim 34, wherein the microRNA-protein complex is payload within the microvesicle.

36. The method of claim 35, wherein the microvesicle is lysed prior to the contacting step.

37. The method of claim 34, wherein the microRNA-protein complex is associated with the outer surface of the microvesicle.

38. The method of any one of claims 14-37, wherein the detecting is used to characterize a phenotype.

39. The method of claim 38, wherein the phenotype is a condition, disease or disorder.

40. The method of claim 39, wherein the characterizing comprises providing diagnostic, prognostic and/or theranostic information for the disease or disorder.

41. The method of any of claims 39-40, wherein the characterizing comprises comparing a presence or level of the at least one microRNA-protein complex to a reference.

42. The method of claim 41, wherein the reference comprises a presence or level of the at least one microRNA-protein complex in a sample from an individual without the disease or disorder.

43. The method of any one of claims 14-42, wherein the sample comprises a bodily fluid, tissue sample or cell culture.

44. The method of claim 43, wherein the bodily fluid comprises peripheral blood, sera, plasma, ascites, urine, cerebrospinal fluid (CSF), sputum, saliva, bone marrow, synovial fluid, aqueous humor, amniotic fluid, cerumen, breast milk, broncheoalveolar lavage fluid, semen, prostatic fluid, cowper's fluid or pre-ejaculatory fluid, female ejaculate, sweat, fecal matter, hair oil, tears, cyst fluid, pleural and peritoneal fluid, pericardial fluid, lymph, chyme, chyle, bile, interstitial fluid, menses, pus, sebum, vomit, vaginal secretions, mucosal secretion, stool water, pancreatic juice, lavage fluids from sinus cavities, bronchopulmonary aspirates, blastocyl cavity fluid, or umbilical cord blood.

45. The method any one of claims 14-44, wherein the sample is from a subject suspected of having or being predisposed to a disease or disorder.

46. The method of any of claims 39-45, wherein the disease or disorder comprises a cancer, a premalignant condition, an inflammatory disease, an immune disease, an autoimmune disease or disorder, a pregnancy related disorder, a cardiovascular disease or disorder, a neurological disease or disorder, an infectious disease or pain.

47. The method of claim 46, wherein the cancer comprises an acute lymphoblastic leukemia;
acute myeloid leukemia; adrenocortical carcinoma; AIDS-related cancers; AIDS-related lymphoma; anal cancer; appendix cancer; astrocytomas; atypical teratoid/rhabdoid tumor; basal cell carcinoma; bladder cancer; brain stem glioma; brain tumor (including brain stem glioma, central nervous system atypical teratoid/rhabdoid tumor, central nervous system embryonal tumors, astrocytomas, craniopharyngioma, ependymoblastoma, ependymoma, medulloblastoma, medulloepithelioma, pineal parenchymal tumors of intermediate differentiation, supratentorial primitive neuroectodermal tumors and pineoblastoma); breast cancer; bronchial tumors; Burkitt lymphoma; cancer of unknown primary site; carcinoid tumor; carcinoma of unknown primary site; central nervous system atypical teratoid/rhabdoid tumor; central nervous system embryonal tumors; cervical cancer; childhood cancers; chordoma; chronic lymphocytic leukemia; chronic myelogenous leukemia; chronic myeloproliferative disorders; colon cancer; colorectal cancer; craniopharyngioma; cutaneous T-cell lymphoma; endocrine pancreas islet cell tumors; endometrial cancer; ependymoblastoma; ependymoma; esophageal cancer; esthesioneuroblastoma; Ewing sarcoma; extracranial germ cell tumor; extragonadal germ cell tumor; extrahepatic bile duct cancer; gallbladder cancer; gastric (stomach) cancer; gastrointestinal carcinoid tumor; gastrointestinal stromal cell tumor; gastrointestinal stromal tumor (GIST); gestational trophoblastic tumor; glioma; hairy cell leukemia; head and neck cancer; heart cancer; Hodgkin lymphoma; hypopharyngeal cancer; intraocular melanoma; islet cell tumors; Kaposi sarcoma; kidney cancer; Langerhans cell histiocytosis; laryngeal cancer; lip cancer; liver cancer; lung cancer; malignant fibrous histiocytoma bone cancer; medulloblastoma; medulloepithelioma; melanoma; Merkel cell carcinoma; Merkel cell skin carcinoma; mesothelioma; metastatic squamous neck cancer with occult primary; mouth cancer; multiple endocrine neoplasia syndromes; multiple myeloma; multiple myeloma/plasma cell neoplasm; mycosis fungoides; myelodysplastic syndromes; myeloproliferative neoplasms; nasal cavity cancer; nasopharyngeal cancer; neuroblastoma; Non-Hodgkin lymphoma; nonmelanoma skin cancer; non-small cell lung cancer; oral cancer; oral cavity cancer; oropharyngeal cancer; osteosarcoma; other brain and spinal cord tumors; ovarian cancer; ovarian epithelial cancer; ovarian germ cell tumor; ovarian low malignant potential tumor; pancreatic cancer; papillomatosis; paranasal sinus cancer; parathyroid cancer; pelvic cancer; penile cancer; pharyngeal cancer; pineal parenchymal tumors of intermediate differentiation; pineoblastoma; pituitary tumor; plasma cell neoplasm/multiple myeloma; pleuropulmonary blastoma; primary central nervous system (CNS) lymphoma; primary hepatocellular liver cancer; prostate cancer; rectal cancer; renal cancer; renal cell (kidney) cancer; renal cell cancer; respiratory tract cancer; retinoblastoma; rhabdomyosarcoma; salivary gland cancer; Sézary syndrome; small cell lung cancer; small intestine cancer; soft tissue sarcoma; squamous cell carcinoma; squamous neck cancer; stomach (gastric) cancer; supratentorial primitive neuroectodermal tumors; T-cell lymphoma; testicular cancer; throat cancer; thymic carcinoma; thymoma; thyroid cancer; transitional cell cancer; transitional cell cancer of the renal pelvis and ureter; trophoblastic tumor; ureter cancer; urethral cancer; uterine cancer; uterine sarcoma; vaginal cancer; vulvar cancer; Waldenström macroglobulinemia; or Wilm's tumor.

48. The method of claim 47, wherein the premalignant condition comprises Barrett's Esophagus.

49. The method of claim 47, wherein the autoimmune disease comprises inflammatory bowel disease (IBD), Crohn's disease (CD), ulcerative colitis (UC), pelvic inflammation, vasculitis, psoriasis, diabetes, autoimmune hepatitis, multiple sclerosis, myasthenia gravis, Type I diabetes, rheumatoid arthritis, psoriasis, systemic lupus erythematosis (SLE), Hashimoto's Thyroiditis, Grave's disease, Ankylosing Spondylitis Sjogrens Disease, CREST syndrome, Scleroderma, Rheumatic Disease, organ rejection, Primary Sclerosing Cholangitis, or sepsis.

50. The method of claim 47, wherein the cardiovascular disease comprises atherosclerosis, congestive heart failure, vulnerable plaque, stroke, ischemia, high blood pressure, stenosis, vessel occlusion or a thrombotic event.

51. The method of claim 47, wherein the neurological disease comprises Multiple Sclerosis (MS), Parkinson's Disease (PD), Alzheimer's Disease (AD), schizophrenia, bipolar disorder, depression, autism, Prion Disease, Pick's disease, dementia, Huntington disease (HD), Down syndrome, cerebrovascular disease, Rasmussen's encephalitis, viral meningitis, neurospsychiatric systemic lupus erythematosus (NPSLE), amyotrophic lateral sclerosis, Creutzfeldt-Jacob disease, Gerstmann-Straussler-Scheinker disease, transmissible spongiform encephalopathy, ischemic reperfusion damage (e.g. stroke), brain trauma, microbial infection, or chronic fatigue syndrome.

52. The method of claim 47, wherein the pain comprises fibromyalgia, chronic neuropathic pain, or peripheral neuropathic pain.

53. The method of claim 47, wherein the infectious disease comprises a bacterial infection, viral infection, yeast infection, Whipple's Disease, Prion Disease, cirrhosis, methicillin-resistant staphylococcus aureus, HIV, HCV, hepatitis, syphilis, meningitis, malaria, tuberculosis, influenza.

54. A kit comprising a reagent for carrying out the method of any of claims 14-53.

55. Use of a reagent for carrying out the method of any of claims 14-53.

56. The kit of claim 54 or use of claim 55, wherein the reagent comprises an oligonucleotide or plurality of oligonucleotides according to any one of claims 1-12 and/or a composition of claim 13.

57. A method of enriching a plurality of oligonucleotides, comprising:
(a) contacting a first microvesicle population with the plurality of oligonucleotides;
(b) fractionating the first microvesicle population contacted in step (a) and recovering members of the plurality of oligonucleotides that fractionated with the first microvesicle population;
(c) contacting the recovering members of the plurality of oligonucleotides from step (b) with a second microvesicle population;
(d) fractionating the second microvesicle population contacted in step (c) and recovering members of the plurality of oligonucleotides that did not fractionate with the second microvesicle population;
(e) contacting the recovering members of the plurality of oligonucleotides from step (d) with a third microvesicle population; and
(f) fractionating the third microvesicle population contacted in step (a) and recovering members of the plurality of oligonucleotides that fractionated with the third microvesicle population; thereby enriching the plurality of oligonucleotides.

58. The method of claim 57, wherein the first and third microvesicle populations have a first phenotype and the second microvesicle population has a second phenotype.

59. The method of claim 58, wherein the first phenotype comprises a medical condition, disease or disorder and the second phenotype comprises a healthy state or a different state of the medical condition, disease or disorder.

60. The method of claim 58, wherein the first phenotype comprises a healthy state and the second phenotype comprises a medical condition, disease or disorder.

61. The method of any of claims 59-60, wherein the medical condition, disease or disorder comprises a cancer, a premalignant condition, an inflammatory disease, an immune disease, an autoimmune disease or disorder, a cardiovascular disease or disorder, neurological disease or disorder, infectious disease or pain.

62. The method of claim 57, wherein the fractionating comprises ultracentrifugation in step (b) and polymer precipitation in steps (d) and (f).

63. The method of claim 57, wherein the contacting is performed in the presence of a competitor.

64. The method of claim 63, wherein the competitor comprises at least one of salmon sperm DNA, tRNA, dextran sulfate and carboxymethyl dextran.

65. The method of claim 57, wherein steps (a)-(f) are repeated at least once.

66. The method of claim 57, further comprising:
(g) repeating steps (a)-(b) at least once prior to step (c), wherein the recovered members of the plurality of oligonucleotides that fractionated with the first microvesicle population in step (b) are used as the input plurality of oligonucleotides for the repetition of step (a);
(h) repeating steps (c)-(d) at least once prior to step (e), wherein the recovered members of the plurality of oligonucleotides that did not fractionate with the second microvesicle population in step (d) are used as the input plurality of oligonucleotides for the repetition of step (c); and/or
(i) repeating steps (e)-(f) at least once, wherein the recovered members of the plurality of oligonucleotides that fractionated with the third microvesicle population in step (f) are used as the input plurality of oligonucleotides for the repetition of step (e).

67. The method of claim 66, wherein (g)-(i) each comprise three repetitions.

68. The method of claim 57, further comprising identifying at least one microvesicle antigen recognized by at least one member of the enriched plurality of oligonucleotides.

69. A kit comprising a reagent for carrying out the method of any of claims 57-68.

70. Use of a reagent for carrying out the method of any of claims 57-68.

71. The kit of claim 69 or use of claim 70, wherein the reagent comprises at least one of a binding agent to a microvesicle surface protein, an unenriched plurality of oligonucleotides, a partially enriched plurality of oligonucleotides, components to fractionate microvesicles, PEG, a nucleic acid competitor, salmon sperm DNA, tRNA, dextran sulfate, carboxymethyl dextran, and instructions.

72. A method of identifying at least one protein associated with at least one microvesicle in a biological sample, comprising: a) contacting the at least one microvesicle with an oligonucleotide probe library, b) isolating at least one protein bound by at least one member of the oligonucleotide probe library in step a); and c) identifying the at least one protein isolated in step b).

73. The method of claim 72, wherein the identifying comprises use of mass spectrometry, 2-D gel electrophoresis or an antibody array.

74. A method of detecting at least one microvesicle in a biological sample comprising contacting the biological sample with at least one binding agent to at least one protein in any of Tables 22-34 and detecting the at least one microvesicle recognized by the binding agent to the at least one protein.

75. The method of claim 74, wherein the at least one binding agent comprises a nucleic acid, DNA molecule, RNA molecule, antibody, antibody fragment, aptamer, peptoid, zDNA, peptide nucleic acid (PNA), locked nucleic acid (LNA), lectin, peptide, dendrimer, membrane protein labeling agent, chemical compound, or a combination thereof.

76. The method of claim 74, wherein the at least one binding agent comprises at least one oligonucleotide.

77. The method of any one of claims 74-76, wherein the at least one binding agent is used to capture and/or detect the at least one microvesicle.

78. The method of claim 77, wherein the at least one binding agent used to capture the at least one microvesicle is bound to a substrate.

79. The method of claim 78, wherein the substrate comprises a planar array, a column matrix, or a microbead.

80. The method of claim 77, wherein the at least one binding agent used to detect the at least one microvesicle is labeled.

81. The method of claim 80, wherein the label comprises at least one of a magnetic label, a fluorescent moiety, an enzyme, a chemiluminescent probe, a metal particle, a non-metal colloidal particle, a polymeric dye particle, a pigment molecule, a pigment particle, an electrochemically active species, a semiconductor nanocrystal, a nanoparticle, a quantum dot, a gold particle, a fluorophore, or a radioactive label.

82. The method of any one of claims 74-81, wherein the detected at least one microvesicle is found at higher levels in a healthy sample as compared to a diseased sample.

83. The method of any one of claims 74-81, wherein the detected at least one microvesicle is found at higher levels in a diseased sample as compared to a healthy sample.

84. The method of any one of claims 74-83, wherein the detecting is used to characterize a phenotype.

85. The method of claim 84, wherein the phenotype is a disease or disorder.

86. The method of claim 85, wherein the characterizing comprises providing diagnostic, prognostic and/or theranostic information for the disease or disorder.

87. The method of claim 85, wherein the characterizing comprises comparing a presence or level of the at least one microvesicle to a reference.

88. The method of claim 87, wherein the reference comprises a presence or level of the at least one microvesicle in a sample from an individual without the disease or disorder.

89. The method of any one of claims 72-88, wherein the biological sample comprises a bodily fluid, tissue sample or cell culture.

90. The method of claim 89, wherein the bodily fluid or tissue sample are from a subject having or suspected of having a medical condition, a disease or a disorder.

91. The method of claim 89 or 90, wherein the bodily fluid comprises peripheral blood, sera, plasma, ascites, urine, cerebrospinal fluid (CSF), sputum, saliva, bone marrow, synovial fluid, aqueous humor, amniotic fluid, cerumen, breast milk, broncheoalveolar lavage fluid, semen, prostatic fluid, cowper's fluid or pre-ejaculatory fluid, female ejaculate, sweat, fecal matter, hair oil, tears, cyst fluid, pleural and peritoneal fluid, pericardial fluid, lymph, chyme, chyle, bile, interstitial fluid, menses, pus, sebum, vomit, vaginal secretions, mucosal secretion, stool water, pancreatic juice, lavage fluids from sinus cavities, bronchopulmonary aspirates, blastocyl cavity fluid, or umbilical cord blood.

92. The method any one of claims 72-91, wherein the biological sample is from a subject suspected of having or being predisposed to a disease or disorder.

93. The method of any of claims 85-92, wherein the disease or disorder comprises a cancer, a premalignant condition, an inflammatory disease, an immune disease, an autoimmune disease or disorder, a cardiovascular disease or disorder, neurological disease or disorder, infectious disease or pain.

94. The method of claim 93, wherein the cancer comprises an acute lymphoblastic leukemia; acute myeloid leukemia; adrenocortical carcinoma; AIDS-related cancers; AIDS-related lymphoma; anal cancer; appendix cancer; astrocytomas; atypical teratoid/rhabdoid tumor; basal cell carcinoma; bladder cancer; brain stem glioma; brain tumor (including brain stem glioma, central nervous system atypical teratoid/rhabdoid tumor, central nervous system embryonal tumors, astrocytomas, craniopharyngioma, ependymoblastoma, ependymoma, medulloblastoma, medulloepithelioma, pineal parenchymal tumors of intermediate differentiation, supratentorial primitive neuroectodermal tumors and pineoblastoma); breast cancer; bronchial tumors; Burkitt lymphoma; cancer of unknown primary site; carcinoid tumor; carcinoma of unknown primary site; central nervous system atypical teratoid/rhabdoid tumor; central nervous system embryonal tumors; cervical cancer; childhood cancers; chordoma; chronic lymphocytic leukemia; chronic myelogenous leukemia; chronic myeloproliferative disorders; colon cancer; colorectal cancer; craniopharyngioma; cutaneous T-cell lymphoma; endocrine pancreas islet cell tumors; endometrial cancer; ependymoblastoma; ependymoma; esophageal cancer; esthesioneuroblastoma; Ewing sarcoma; extracranial germ cell tumor; extragonadal germ cell tumor; extrahepatic bile duct cancer; gallbladder cancer; gastric (stomach) cancer; gastrointestinal carcinoid tumor; gastrointestinal stromal cell tumor; gastrointestinal stromal tumor (GIST); gestational trophoblastic tumor; glioma; hairy cell leukemia; head and neck cancer; heart cancer; Hodgkin lymphoma; hypopharyngeal cancer; intraocular melanoma; islet cell tumors; Kaposi sarcoma; kidney cancer; Langerhans cell histiocytosis; laryngeal cancer; lip cancer; liver cancer; lung cancer; malignant fibrous histiocytoma bone cancer; medulloblastoma; medulloepithelioma; melanoma; Merkel cell carcinoma; Merkel cell skin carcinoma; mesothelioma; metastatic squamous neck cancer with occult primary; mouth cancer; multiple endocrine neoplasia syndromes; multiple myeloma; multiple myeloma/plasma cell neoplasm; mycosis fungoides; myelodysplastic syndromes; myeloproliferative neoplasms; nasal cavity cancer; nasopharyngeal cancer; neuroblastoma; Non-Hodgkin lymphoma; nonmelanoma skin cancer; non-small cell lung cancer; oral cancer; oral cavity cancer; oropharyngeal cancer; osteosarcoma; other brain and spinal cord tumors; ovarian cancer; ovarian epithelial cancer; ovarian germ cell tumor; ovarian low malignant potential tumor; pancreatic cancer; papillomatosis; paranasal sinus cancer; parathyroid cancer; pelvic cancer; penile cancer; pharyngeal cancer; pineal parenchymal tumors of intermediate differentiation; pineoblastoma; pituitary tumor; plasma cell neoplasm/multiple myeloma; pleuropulmonary blastoma; primary central nervous system (CNS) lymphoma; primary hepatocellular liver cancer; prostate cancer; rectal cancer; renal cancer; renal cell (kidney) cancer; renal cell cancer; respiratory tract cancer; retinoblastoma; rhabdomyosarcoma; salivary gland cancer; Sézary syndrome; small cell lung cancer; small intestine cancer; soft tissue sarcoma; squamous cell carcinoma; squamous neck cancer; stomach (gastric) cancer; supratentorial primitive neuroectodermal tumors; T-cell lymphoma; testicular cancer; throat cancer; thymic carcinoma; thymoma; thyroid cancer; transitional cell cancer; transitional cell cancer of the renal pelvis and ureter; trophoblastic tumor; ureter cancer; urethral cancer; uterine cancer; uterine sarcoma; vaginal cancer; vulvar cancer; Waldenström macroglobulinemia; or Wilm's tumor.

95. The method of claim 93, wherein the premalignant condition comprises Barrett's Esophagus.

96. The method of claim 93, wherein the autoimmune disease comprises inflammatory bowel disease (IBD), Crohn's disease (CD), ulcerative colitis (UC), pelvic inflammation, vasculitis, psoriasis, diabetes, autoimmune hepatitis, multiple sclerosis, myasthenia gravis, Type I diabetes, rheumatoid arthritis, psoriasis, systemic lupus erythematosis (SLE), Hashimoto's Thyroiditis, Grave's disease, Ankylosing Spondylitis Sjogrens Disease, CREST syndrome, Scleroderma, Rheumatic Disease, organ rejection, Primary Sclerosing Cholangitis, or sepsis.

97. The method of claim 93, wherein the cardiovascular disease comprises atherosclerosis, congestive heart failure, vulnerable plaque, stroke, ischemia, high blood pressure, stenosis, vessel occlusion or a thrombotic event.

98. The method of claim 93, wherein the neurological disease comprises Multiple Sclerosis (MS), Parkinson's Disease (PD), Alzheimer's Disease (AD), schizophrenia, bipolar disorder, depression, autism, Prion Disease, Pick's disease, dementia, Huntington disease (HD), Down's syndrome, cerebrovascular disease, Rasmussen's encephalitis, viral meningitis, neurospsychiatric systemic lupus erythematosus (NPSLE), amyotrophic lateral sclerosis, Creutzfeldt-Jacob disease, Gerstmann-Straussler-Scheinker disease, transmissible spongiform encephalopathy, ischemic reperfusion damage (e.g. stroke), brain trauma, microbial infection, or chronic fatigue syndrome.

99. The method of claim 93, wherein the pain comprises fibromyalgia, chronic neuropathic pain, or peripheral neuropathic pain.

100. The method of claim 93, wherein the infectious disease comprises a bacterial infection, viral infection, yeast infection, Whipple's Disease, Prion Disease, cirrhosis, methicillin-resistant staphylococcus aureus, HIV, HCV, hepatitis, syphilis, meningitis, malaria, tuberculosis, influenza.

101. A kit comprising a reagent for carrying out the method of any of claims 72-100.

102. Use of a reagent for carrying out the method of any of claims 72-100.

103. The kit of claim 101 or use of claim 102, wherein the reagent comprises at least one binding agent to the at least one protein.

The application's sequence listing, which the Patent Office published only in electronic form, follows.

SEQUENCE LISTING (7950 sequences)

SEQ ID NO: 1 - DNA, 32 bp, Artificial Sequence
  Synthetic oligonucleotide
ccccccgaatcacatgacttgggcgggggtcg

SEQ ID NO: 2 - DNA, 32 bp, Artificial Sequence
  Synthetic oligonucleotide
accggatagcggttggaggcgtgctccactcg

SEQ ID NO: 3 - DNA, 32 bp, Artificial Sequence
  Synthetic oligonucleotide
ccgcgcagatatacaacgtacctctgtgcgca

SEQ ID NO: 4 - DNA, 70 bp, Artificial Sequence
  Synthetic oligonucleotide
atccagagtgacgcagcagtcttttctgatggacacgtggtggtctagtatctggacacggtggcttagt

SEQ ID NO: 5 - RNA, 70 nt, Artificial Sequence
  Synthetic oligonucleotide
auccagagugacgcagcagucuuuucugauggacacgugguggucuaguaucacuaagccaccgugucca

SEQ ID NO: 6 - DNA, 32 bp, Artificial Sequence
  Synthetic oligonucleotide
ctgtgaggcgtactgcggtgagcctctcatta

SEQ ID NO: 7 - DNA, 26 bp, Artificial Sequence
  Synthetic oligonucleotide
caattgggcccgtccgtatggtgggt

SEQ ID NO: 8 - RNA, 80 nt, Artificial Sequence
  Synthetic oligonucleotide
  site 15..55: n = a, g, c, t/u, unknown or other
gggaggacgaugcggnnnnnnnnnnnnnnnnnnnnnnnnnnnnnnnnnnnnnnnncagacgacucgcugaggauccgaga

SEQ ID NO: 9 - RNA, 15 nt, Artificial Sequence
  Synthetic oligonucleotide
gggaggacgaugcgg

SEQ ID NO: 10 - RNA, 25 nt, Artificial Sequence
  Synthetic oligonucleotide
cagacgacucgcugaggauccgaga

SEQ ID NO: 11 - RNA, 40 nt, Artificial Sequence
  Synthetic oligonucleotide
cgcgucuuccccgcauugccgcaauugccauacauuaaua

SEQ ID NO: 12 - DNA, 40 bp, Artificial Sequence
  Synthetic oligonucleotide
cgcgtcttccccgcattgccgcaattgccatacattaata

SEQ ID NO: 13 - RNA, 40 nt, Artificial Sequence
  Synthetic oligonucleotide
guccggaacgccucgauccucgcauaauaugauacgucug

SEQ ID NO: 14 - DNA, 40 bp, Artificial Sequence
  Synthetic oligonucleotide
gtccggaacgcctcgatcctcgcataatatgatacgtctg

SEQ ID NO: 15 - RNA, 40 nt, Artificial Sequence
  Synthetic oligonucleotide
guccaugguacgccucgauuccgcccauacaugcauguaa

SEQ ID NO: 16 - DNA, 40 bp, Artificial Sequence
  Synthetic oligonucleotide
gtccatggtacgcctcgattccgcccatacatgcatgtaa

SEQ ID NO: 17 - RNA, 40 nt, Artificial Sequence
  Synthetic oligonucleotide
cacuauccguuuguccguccucuugugguauugcgcaugc

SEQ ID NO: 18 - DNA, 40 bp, Artificial Sequence
  Synthetic oligonucleotide
cactatccgtttgtccgtcctcttgtggtattgcgcatgc

SEQ ID NO: 19 - RNA, 40 nt, Artificial Sequence
  Synthetic oligonucleotide
ucuuccaucuggucgcgauacagaauacgauuaacauaaa

SEQ ID NO: 20 - DNA, 40 bp, Artificial Sequence
  Synthetic oligonucleotide
tcttccatctggtcgcgatacagaatacgattaacataaa

SEQ ID NO: 21 - RNA, 40 nt, Artificial Sequence
  Synthetic oligonucleotide
gaucacgcugcccuuuguuuaaggccuuuauacaaacgca

SEQ ID NO: 22 - DNA, 40 bp, Artificial Sequence
  Synthetic oligonucleotide
gatcacgctgccctttgtttaaggcctttatacaaacgca

SEQ ID NO: 23 - RNA, 40 nt, Artificial Sequence
  Synthetic oligonucleotide
uauucgccagucacaucaacuaugaugacgcuugacugga

SEQ ID NO: 24 - DNA, 40 bp, Artificial Sequence
  Synthetic oligonucleotide
tattcgccagtcacatcaactatgatgacgcttgactgga

SEQ ID NO: 25 - RNA, 40 nt, Artificial Sequence
  Synthetic oligonucleotide
uaccgccucaucaucggacacgacguguaucaguuggcug

SEQ ID NO: 26 - RNA, 40 nt, Artificial Sequence
  Synthetic oligonucleotide
guucucgccucuguccucaugguucgaaccgguaugcaug

SEQ ID NO: 27 - RNA, 40 nt, Artificial Sequence
  Synthetic oligonucleotide
gcgguuucuucuccugacuacaugagauuaauaaacgcgc

SEQ ID NO: 28 - RNA, 40 nt, Artificial Sequence
  Synthetic oligonucleotide
ccgccucgaacacugacgucguggaaccuucgauugcuag

SEQ ID NO: 29 - RNA, 40 nt, Artificial Sequence
  Synthetic oligonucleotide
aaucacaguaauucugccccucugaugaaaccgguuacuu

SEQ ID NO: 30 - RNA, 40 nt, Artificial Sequence
  Synthetic oligonucleotide
cuuagugauuucgccgccccucuguuuaguggccauugga

SEQ ID NO: 31 - RNA, 40 nt, Artificial Sequence
  Synthetic oligonucleotide
acacuauuccgguaagucaucguuuaaccguuuguugcaa

SEQ ID NO: 32 - RNA, 40 nt, Artificial Sequence
  Synthetic oligonucleotide
ugcgcaacgccuugauucacuccuacagugugucuauaga

SEQ ID NO: 33 - RNA, 40 nt, Artificial Sequence
  Synthetic oligonucleotide
aauguuaagcuuacauacgccugggucacucuuuguucug

SEQ ID NO: 34 - RNA, 40 nt, Artificial Sequence
  Synthetic oligonucleotide
guaaauauucacguugaaucgccuugcuccucuuagucug

SEQ ID NO: 35 - RNA, 40 nt, Artificial Sequence
  Synthetic oligonucleotide
ccgccucggaucguucccaauggugguaccccuauuaaug

SEQ ID NO: 36 - RNA, 40 nt, Artificial Sequence
  Synthetic oligonucleotide
uguagaucguucuuauccgccucggucuuccccagguuaa

SEQ ID NO: 37 - RNA, 40 nt, Artificial Sequence
  Synthetic oligonucleotide
aucgucgggccccuuuuaugaaacuuacaugaaagcgcac

SEQ ID NO: 38 - RNA, 40 nt, Artificial Sequence
  Synthetic oligonucleotide
uaagagugcacaguacugccucgauccuccauggcuuaag

SEQ ID NO: 39 - RNA, 40 nt, Artificial Sequence
  Synthetic oligonucleotide
gaauuaguacugacggccgccuugauccuccguuagucug

SEQ ID NO: 40 - RNA, 40 nt, Artificial Sequence
  Synthetic oligonucleotide
gcccgccuccgaagcccuccuaagugcacuuuaaaccgcg

SEQ ID NO: 41 - RNA, 40 nt, Artificial Sequence
  Synthetic oligonucleotide
ccgccugggaucacucucuacgcguauaaaugcucuguca

SEQ ID NO: 42 - RNA, 40 nt, Artificial Sequence
  Synthetic oligonucleotide
agucugacccuguuauggacuaccauaucagaaagguacu

SEQ ID NO: 43 - RNA, 40 nt, Artificial Sequence
  Synthetic oligonucleotide
ggugauccucccccccgccucgaagauuugugcacauauc

SEQ ID NO: 44 - RNA, 40 nt, Artificial Sequence
  Synthetic oligonucleotide
gcuaccaucgucuagugagucacccuuaguucaucaaggc

SEQ ID NO: 45 - DNA, 18 bp, Artificial Sequence
  Synthetic oligonucleotide
cggacacggtggcttagc

SEQ ID NO: 46 - DNA, 20 bp, Artificial Sequence
  Synthetic oligonucleotide
acgtactgcagtcatgctag

SEQ ID NO: 47 - DNA, 18 bp, Artificial Sequence
  Synthetic oligonucleotide
gctgtgtgactcctgcaa

SEQ ID NO: 48 - DNA, 19 bp, Artificial Sequence
  Synthetic oligonucleotide
gcagctgtatcttgtctcc

SEQ ID NO: 49 - DNA, 43 bp, Artificial Sequence
  Synthetic oligonucleotide
gtccgcttgggggtgggtatcgaaaattcgcgttctggggcgg

SEQ ID NO: 50 - DNA, 43 bp, Artificial Sequence
  Synthetic oligonucleotide
cttcgctcgtttcaatgttcagttctggtctttaggtctttag

SEQ ID NO: 51 - DNA, 43 bp, Artificial Sequence
  Synthetic oligonucleotide
taggaggataatatgtatccggtgcatcggcctgactttcccc

SEQ ID NO: 52 - DNA, 43 bp, Artificial Sequence
  Synthetic oligonucleotide
taggagggctgaaaacttgcttcttcccggtgcagttataaca

SEQ ID NO: 53 - DNA, 43 bp, Artificial Sequence
  Synthetic oligonucleotide
taggaggataatatgtatccgatgcatgggcccgactttcccc

SEQ ID NO: 54 - DNA, 43 bp, Artificial Sequence
  Synthetic oligonucleotide
tgcgttttccttggggttcagggtaggatgggggtggaggtgg

SEQ ID NO: 55 - DNA, 43 bp, Artificial Sequence
  Synthetic oligonucleotide
ggggggcgggtgggctggtaaaaggtgatgcgggggtattgtt

SEQ ID NO: 56 - DNA, 43 bp, Artificial Sequence
  Synthetic oligonucleotide
taggaggataatatgtatccggtgcatcggcccaactttcccc

SEQ ID NO: 57 - DNA, 43 bp, Artificial Sequence
  Synthetic oligonucleotide
ccaatctcggaaggtttaaataaggtggtctttaggtctttag

SEQ ID NO: 58 - DNA, 43 bp, Artificial Sequence
  Synthetic oligonucleotide
tacgttaagtgggtcgggaggggggaatagggggtttggttgg

SEQ ID NO: 59 - DNA, 43 bp, Artificial Sequence
  Synthetic oligonucleotide
gtgaggtcggtggggcgggggatggtggggggtcgtttacatt

SEQ ID NO: 60 - DNA, 42 bp, Artificial Sequence
  Synthetic oligonucleotide
cgatattgggggggggttggcgggctattttccgggtgggtg

SEQ ID NO: 61 - DNA, 43 bp, Artificial Sequence
  Synthetic oligonucleotide
tcggttcctgttaattcgctggtggttggtggggtggcggatg

SEQ ID NO: 62 - DNA, 42 bp, Artificial Sequence
  Synthetic oligonucleotide
gcggggaggtgggggtgggtggagggttggttactctctact

SEQ ID NO: 63 - DNA, 43 bp, Artificial Sequence
  Synthetic oligonucleotide
cgggaatgggagggtgggggtggtggccgggtcgtgttatacc

SEQ ID NO: 64 - DNA, 43 bp, Artificial Sequence
  Synthetic oligonucleotide
taggaggataatatgtatccggtgcatcggtccgactttcccc

SEQ ID NO: 65 - DNA, 43 bp, Artificial Sequence
  Synthetic oligonucleotide
tatagttgggcgtaggcgggggggggtggttgggaggtccaag

SEQ ID NO: 66 - DNA, 43 bp, Artificial Sequence
  Synthetic oligonucleotide
taggaggataatatgtatccggtgcatcggcccgaccttcccc

SEQ ID NO: 67 - DNA, 43 bp, Artificial Sequence
  Synthetic oligonucleotide
tcgatcgtcctcaggatctcgtggttcaaatcataaagattat

SEQ ID NO: 68 - DNA, 43 bp, Artificial Sequence
  Synthetic oligonucleotide
tgctgtctgggcgggggcggtcttgtggtttctttgggggggg

SEQ ID NO: 69 - DNA, 43 bp, Artificial Sequence
  Synthetic oligonucleotide
gcgagacaggagggtggtcttatacgtgggggggggtggttgg

SEQ ID NO: 70 - DNA, 43 bp, Artificial Sequence
  Synthetic oligonucleotide
taggagggctgaagacttgcttcttcccggtgcagttataaca

SEQ ID NO: 71 - DNA, 43 bp, Artificial Sequence
  Synthetic oligonucleotide
cgtgtggggggtgggttgggctcgggttgttatcagttccatg

SEQ ID NO: 72 - DNA, 43 bp, Artificial Sequence
  Synthetic oligonucleotide
cgatattggggggggggttggcgggctattttccgggtgggtg

SEQ ID NO: 73 - DNA, 43 bp, Artificial Sequence
  Synthetic oligonucleotide
taggaggataatatgtatccggtgcatcggcccgactttcctc

SEQ ID NO: 74 - DNA, 43 bp, Artificial Sequence
  Synthetic oligonucleotide
taggaggataatatgtatccggtgcatcggctcgactttcccc

SEQ ID NO: 75 - DNA, 43 bp, Artificial Sequence
  Synthetic oligonucleotide
cttcgctcgtttcaatgtttagttctggtctttaggtctttag

SEQ ID NO: 76 - DNA, 43 bp, Artificial Sequence
  Synthetic oligonucleotide
ggacatgggttgggtcgggagggggtggtcggttgggcagtaa

SEQ ID NO: 77 - DNA, 43 bp, Artificial Sequence
  Synthetic oligonucleotide
taggaggataatatgtatacgatgcatcggcccgactttcccc

SEQ ID NO: 78 - DNA, 43 bp, Artificial Sequence
  Synthetic oligonucleotide
taggaggataatatgtatcagatgcatcggcccgactttcccc

SEQ ID NO: 79 - DNA, 43 bp, Artificial Sequence
  Synthetic oligonucleotide
tggatgtatggggtctcggggtgggagggttcaacttatctgg

SEQ ID NO: 80 - DNA, 43 bp, Artificial Sequence; identical to SEQ ID NO: 49
  Synthetic oligonucleotide

SEQ ID NO: 81 - DNA, 43 bp, Artificial Sequence
  Synthetic oligonucleotide
tcttgtacaaataggagggaagggggttttgggaggtgggtgg

SEQ ID NO: 82 - DNA, 43 bp, Artificial Sequence; identical to SEQ ID NO: 50
  Synthetic oligonucleotide

SEQ ID NO: 83 - DNA, 43 bp, Artificial Sequence
  Synthetic oligonucleotide
ctgatgttagtaggtcggggtccggttgggggttgggttgagg

SEQ ID NO: 84 - DNA, 43 bp, Artificial Sequence
  Synthetic oligonucleotide
tggctcgtggacgtggtggtggcgggtcgtgggggtgggtagg

SEQ ID NO: 85 - DNA, 43 bp, Artificial Sequence
  Synthetic oligonucleotide
taggaggataatatgtatccgatgcatcggcacgactttcccc

SEQ ID NO: 86 - DNA, 43 bp, Artificial Sequence
  Synthetic oligonucleotide
cggggagggggggtcggggtatttattgtgtatgttttttgtg

SEQ ID NO: 87 - DNA, 43 bp, Artificial Sequence
  Synthetic oligonucleotide
tgactgtatcttggggcgggttctggggggggtgtattgttca

SEQ ID NO: 88 - DNA, 43 bp, Artificial Sequence
  Synthetic oligonucleotide
taggaggataatatgtatccgatgcatcggcccgactttcacc

SEQ ID NO: 89 - DNA, 43 bp, Artificial Sequence
  Synthetic oligonucleotide
tcatgtctaggggggggaagtcggtttgggtgggtactctgtg

SEQ ID NO: 90 - DNA, 43 bp, Artificial Sequence
  Synthetic oligonucleotide
cttgtttcgctttgggtttgggcgggtgggtcaattcctgttg

SEQ ID NO: 91 - DNA, 43 bp, Artificial Sequence
  Synthetic oligonucleotide
ggtgggggccctcggtactgtggcggggtgggtgggtttagtg

SEQ ID NO: 92 - DNA, 43 bp, Artificial Sequence; identical to SEQ ID NO: 54
  Synthetic oligonucleotide

SEQ ID NO: 93 - DNA, 43 bp, Artificial Sequence
  Synthetic oligonucleotide
tggtggggtgggtctgtggggtggttttgttcttatcggggtt

SEQ ID NO: 94 - DNA, 43 bp, Artificial Sequence
  Synthetic oligonucleotide
tgggtgggttacgggtgggtgttgttatcgcgctgatctggtt

SEQ ID NO: 95 - DNA, 43 bp, Artificial Sequence
  Synthetic oligonucleotide
cgtgacggttttaatcaggggggggactctaacatttgggtgg

SEQ ID NO: 96 - DNA, 43 bp, Artificial Sequence
  Synthetic oligonucleotide
tgctcatatcgtggggggatggggttgctagtggatggggtgg

SEQ ID NO: 97 - DNA, 43 bp, Artificial Sequence; identical to SEQ ID NO: 55
  Synthetic oligonucleotide

SEQ ID NO: 98 - DNA, 43 bp, Artificial Sequence
  Synthetic oligonucleotide
tgatgtggggggtggggtataatacttatgtttggggtttggg

SEQ ID NO: 99 - DNA, 43 bp, Artificial Sequence
  Synthetic oligonucleotide
ttgggtgggtgggaatgggtattttttcttcgggcgatgtttg

SEQ ID NO: 100 - DNA, 43 bp, Artificial Sequence
  Synthetic oligonucleotide
tagttggatactggatttgggagggatggggggaggagggtgg

SEQ ID NO: 101 - DNA, 42 bp, Artificial Sequence
  Synthetic oligonucleotide
ctggaaggttgggtgtggggcgggggggaggtctctctatgt

SEQ ID NO: 102 - DNA, 43 bp, Artificial Sequence; identical to SEQ ID NO: 58
  Synthetic oligonucleotide

SEQ ID NO: 103 - DNA, 43 bp, Artificial Sequence
  Synthetic oligonucleotide
tgccgtgggccggggagggtgggttggcgtctctgtttcgata

SEQ ID NO: 104 - DNA, 43 bp, Artificial Sequence
  Synthetic oligonucleotide
gggggggcggccggggtggactgtggcccgtcttcgtattgtt

SEQ ID NO: 105 - DNA, 42 bp, Artificial Sequence
  Synthetic oligonucleotide
tggtggtggctgggggacgggtatcctggaattaggggtggg

SEQ ID NO: 106 - DNA, 43 bp, Artificial Sequence
  Synthetic oligonucleotide
tcggttcatgttgggtgggatcggggcggggtttcttctcctg

SEQ ID NO: 107 - DNA, 43 bp, Artificial Sequence; identical to SEQ ID NO: 77
  Synthetic oligonucleotide

SEQ ID NO: 108 - DNA, 43 bp, Artificial Sequence
  Synthetic oligonucleotide
tcgtgggtgtgttctggggggcgtggacgggggttaatgggca

SEQ ID NO: 109 - DNA, 43 bp, Artificial Sequence
  Synthetic oligonucleotide
taggaggataatatgtatccgatgcatcggcccgactttcccc

SEQ ID NO: 110 - DNA, 43 bp, Artificial Sequence
  Synthetic oligonucleotide
taagagtcttaggatgacgtcattcgtccgtcacggtgcggga

SEQ ID NO: 111 - DNA, 43 bp, Artificial Sequence
  Synthetic oligonucleotide
gcctggccagatagcagttaccttacgggatctatattcaccg

SEQ ID NO: 112 - DNA, 43 bp, Artificial Sequence; identical to SEQ ID NO: 84
  Synthetic oligonucleotide

SEQ ID NO: 113 - DNA, 43 bp, Artificial Sequence
  Synthetic oligonucleotide
ttcgtgttcatctgtttattgttattcacaatccgtcttttgt

SEQ ID NO: 114 - DNA, 43 bp, Artificial Sequence
  Synthetic oligonucleotide
cgaatccgtcgaccgccctcgtaaccatccaacccagtctcct

SEQ ID NO: 115 - DNA, 43 bp, Artificial Sequence
  Synthetic oligonucleotide
caggaaagttacttatcttttagacggttatgttctcattact

SEQ ID NO: 116 - DNA, 43 bp, Artificial Sequence
  Synthetic oligonucleotide
atctgctcgatacgtagatagtctgctcgatacaaaagggtgg

SEQ ID NO: 117 - DNA, 43 bp, Artificial Sequence
  Synthetic oligonucleotide
cgatgagcgggctccgatattgtgtcggcgtgactaccttgat

SEQ ID NO: 118 - DNA, 43 bp, Artificial Sequence
  Synthetic oligonucleotide
ggtcggcctatttattgcggcacgttgtttcttgatgtcgccc

SEQ ID NO: 119 - DNA, 43 bp, Artificial Sequence
  Synthetic oligonucleotide
tcgaattcagttctacatgtgtatttcttgctccgtttcagaa

SEQ ID NO: 120 - DNA, 43 bp, Artificial Sequence
  Synthetic oligonucleotide
tcggtccggcaacaaaccccacgcgccttcgatatgcctgtcg

SEQ ID NO: 121 - DNA, 43 bp, Artificial Sequence; identical to SEQ ID NO: 57
  Synthetic oligonucleotide

SEQ ID NO: 122 - DNA, 43 bp, Artificial Sequence; identical to SEQ ID NO: 72
  Synthetic oligonucleotide

SEQ ID NO: 123 - DNA, 43 bp, Artificial Sequence; identical to SEQ ID NO: 63
  Synthetic oligonucleotide

SEQ ID NO: 124 - DNA, 43 bp, Artificial Sequence
  Synthetic oligonucleotide
cgtggtgggttcttgggtggggggggagggttggcgtagtata

SEQ ID NO: 125 - DNA, 43 bp, Artificial Sequence; identical to SEQ ID NO: 59
  Synthetic oligonucleotide

SEQ ID NO: 126 - DNA, 43 bp, Artificial Sequence; identical to SEQ ID NO: 58
  Synthetic oligonucleotide

SEQ ID NO: 127 - DNA, 43 bp, Artificial Sequence; identical to SEQ ID NO: 56
  Synthetic oligonucleotide

SEQ ID NO: 128 - DNA, 43 bp, Artificial Sequence; identical to SEQ ID NO: 52
  Synthetic oligonucleotide

SEQ ID NO: 129 - DNA, 43 bp, Artificial Sequence; identical to SEQ ID NO: 61
  Synthetic oligonucleotide

SEQ ID NO: 130 - DNA, 43 bp, Artificial Sequence; identical to SEQ ID NO: 68
  Synthetic oligonucleotide

SEQ ID NO: 131 - DNA, 43 bp, Artificial Sequence
  Synthetic oligonucleotide
aacatggggttctgataaacctgtgccaaatacattgttgagt

SEQ ID NO: 132 - DNA, 43 bp, Artificial Sequence
  Synthetic oligonucleotide
attcctcctttgtaagggatgatatccaactcctctgcgttcg

SEQ ID NO: 133 - DNA, 21 bp, Artificial Sequence
  Synthetic oligonucleotide
tagaggtacgtgctgaggctt

SEQ ID NO: 134 - DNA, 88 bp, Artificial Sequence
  Synthetic oligonucleotide
ctagcatgactgcagtacgtcactgcaggcctcagcacgtacctctataaccgccctgtctcttatacacatctgacgctgccgacga

SEQ ID NO: 135 - DNA, 30 bp, Artificial Sequence
  Synthetic oligonucleotide
cgctgaactatacaacctactacctcagcg

SEQ ID NO: 136 - RNA, 22 nt, Artificial Sequence
  Synthetic oligonucleotide
ugagguaguagguuguauaguu

SEQ ID NO: 137 - DNA, 30 bp, Artificial Sequence
  Synthetic oligonucleotide
gcgactccatcatccaacatatcaagtcgc

SEQ ID NO: 138 - DNA, 17 bp, Artificial Sequence
  Synthetic oligonucleotide
ccaacatatcaagtcgc

SEQ ID NO: 139 - DNA, 26 bp, Artificial Sequence
  Synthetic oligonucleotide
cgccaatatttacgtgctgctaggcg

SEQ ID NO: 140 - RNA, 22 nt, Artificial Sequence
  Synthetic oligonucleotide
uagcagcacguaaauauuggcg

SEQ ID NO: 141 - DNA, 26 bp, Artificial Sequence
  Synthetic oligonucleotide
gcggatcgtcgtgcatttataaccgc

SEQ ID NO: 142 - DNA, 12 bp, Artificial Sequence
  Synthetic oligonucleotide
atttataaccgc

SEQ ID NO: 143 - DNA, 32 bp, Artificial Sequence
  Synthetic oligonucleotide
gcgctcaacacatcagtctgataagctagcgc

SEQ ID NO: 144 - RNA, 22 nt, Artificial Sequence
  Synthetic oligonucleotide
uagcuuaucagacugauguuga

SEQ ID NO: 145 - DNA, 32 bp, Artificial Sequence
  Synthetic oligonucleotide
cgcgatcgaatagtctgactacacaactcgcg

SEQ ID NO: 146 - DNA, 18 bp, Artificial Sequence
  Synthetic oligonucleotide
ctgactacacaactcgcg

SEQ ID NO: 147 - DNA, 29 bp, Artificial Sequence
  Synthetic oligonucleotide
cgcagcattgcaaccgatcccaacctgcg

SEQ ID NO: 148 - RNA, 23 nt, Artificial Sequence
  Synthetic oligonucleotide
agguugggaucgguugcaaugcu

SEQ ID NO: 149 - DNA, 29 bp, Artificial Sequence
  Synthetic oligonucleotide
gcgtccaaccctagccaacgttacgacgc

SEQ ID NO: 150 - DNA, 16 bp, Artificial Sequence
  Synthetic oligonucleotide
gccaacgttacgacgc

SEQ ID NO: 151 - DNA, 22 bp, Artificial Sequence
  Synthetic oligonucleotide
actccatcatccaacatatcaa

SEQ ID NO: 152 - DNA, 20 bp, Artificial Sequence
  Synthetic oligonucleotide
ctagcatgactgcagtacgt

SEQ ID NO: 153 - DNA, 33 bp, Artificial Sequence
  Synthetic oligonucleotide
ctgtctcttatacacatctgacgctgccgacga

SEQ ID NO: 154 - DNA, 20 bp, Artificial Sequence
  Synthetic oligonucleotide
gatctcctgtcatctcacct

SEQ ID NO: 155 - DNA, 22 bp, Artificial Sequence
  Synthetic oligonucleotide
tgtagaaccatgtcgtcagtgt

SEQ ID NO: 156 - DNA, 22 bp, Artificial Sequence
  Synthetic oligonucleotide
actccatcactcaacatatcaa

SEQ ID NO: 157 - DNA, 10 bp, Artificial Sequence
  Synthetic oligonucleotide
gatctcctgt

SEQ ID NO: 158 - DNA, 11 bp, Artificial Sequence
  Synthetic oligonucleotide
gatctcctgtc

SEQ ID NO: 159 - DNA, 12 bp, Artificial Sequence
  Synthetic oligonucleotide
gatctcctgtca

SEQ ID NO: 160 - DNA, 13 bp, Artificial Sequence
  Synthetic oligonucleotide
gatctcctgtcat

SEQ ID NO: 161 - DNA, 14 bp, Artificial Sequence
  Synthetic oligonucleotide
gatctcctgtcatc

SEQ ID NO: 162 - DNA, 15 bp, Artificial Sequence
  Synthetic oligonucleotide
gatctcctgtcatct

SEQ ID NO: 163 - DNA, 16 bp, Artificial Sequence
  Synthetic oligonucleotide
gatctcctgtcatctc

SEQ ID NO: 164 - DNA, 17 bp, Artificial Sequence
  Synthetic oligonucleotide
gatctcctgtcatctca

SEQ ID NO: 165 - DNA, 18 bp, Artificial Sequence
  Synthetic oligonucleotide
gatctcctgtcatctcaa

SEQ ID NO: 166 - DNA, 19 bp, Artificial Sequence
  Synthetic oligonucleotide
gatctcctgtcatctcaac

SEQ ID NO: 167 - DNA, 10 bp, Artificial Sequence
  Synthetic oligonucleotide
catctcacct

SEQ ID NO: 168 - DNA, 11 bp, Artificial Sequence
  Synthetic oligonucleotide
tcatctcacct

SEQ ID NO: 169 - DNA, 12 bp, Artificial Sequence
  Synthetic oligonucleotide
gtcatctcacct

SEQ ID NO: 170 - DNA, 13 bp, Artificial Sequence
  Synthetic oligonucleotide
tgtcatctcacct

SEQ ID NO: 171 - DNA, 14 bp, Artificial Sequence
  Synthetic oligonucleotide
ctgtcatctcacct

SEQ ID NO: 172 - DNA, 15 bp, Artificial Sequence
  Synthetic oligonucleotide
cctgtcatctcacct

SEQ ID NO: 173 - DNA, 16 bp, Artificial Sequence
  Synthetic oligonucleotide
tcctgtcatctcacct

SEQ ID NO: 174 - DNA, 17 bp, Artificial Sequence
  Synthetic oligonucleotide
ctcctgtcatctcacct

SEQ ID NO: 175 - DNA, 18 bp, Artificial Sequence
  Synthetic oligonucleotide
tctcctgtcatctcacct

SEQ ID NO: 176 - DNA, 19 bp, Artificial Sequence
  Synthetic oligonucleotide
atctcctgtcatctcacct

SEQ ID NO: 177 - RNA, 22 nt, Artificial Sequence
  Synthetic oligonucleotide
  hsa-miR-576-3p MIMAT0004796
aagauguggaaaaauuggaauc

SEQ ID NO: 178 - RNA, 22 nt, Artificial Sequence
  Synthetic oligonucleotide
  hsa-miR-140-5p MIMAT0000431
cagugguuuuacccuaugguag

SEQ ID NO: 179 - RNA, 22 nt, Artificial Sequence
  Synthetic oligonucleotide
  hsa-miR-522-5p MIMAT0005451
cucuagagggaagcgcuuucug

SEQ ID NO: 180 - RNA, 22 nt, Artificial Sequence
  Synthetic oligonucleotide
  hsa-miR-1298-5p MIMAT0005800
uucauucggcuguccagaugua

SEQ ID NO: 181 - RNA, 22 nt, Artificial Sequence
  Synthetic oligonucleotide
  hsa-miR-133a-3p MIMAT0000427
uuugguccccuucaaccagcug

SEQ ID NO: 182 - RNA, 21 nt, Artificial Sequence
  Synthetic oligonucleotide
  hsa-miR-4743-3p MIMAT0022978
uuucugucuuuucugguccag

SEQ ID NO: 183 - RNA, 23 nt, Artificial Sequence
  Synthetic oligonucleotide
  hsa-miR-557 MIMAT0003221
guuugcacgggugggccuugucu

SEQ ID NO: 184 - RNA, 22 nt, Artificial Sequence
  Synthetic oligonucleotide
  hsa-miR-548ao-3p MIMAT0021030
aaagaccgugacuacuuuugca

SEQ ID NO: 185 - RNA, 24 nt, Artificial Sequence
  Synthetic oligonucleotide
  hsa-miR-5088-5p MIMAT0021080
cagggcucagggauuggauggagg

SEQ ID NO: 186 - RNA, 24 nt, Artificial Sequence
  Synthetic oligonucleotide
  hsa-miR-4649-5p MIMAT0019711
ugggcgaggggugggcucucagag

SEQ ID NO: 187 - RNA, 20 nt, Artificial Sequence
  Synthetic oligonucleotide
  hsa-miR-665 MIMAT0004952
accaggaggcugaggccccu

SEQ ID NO: 188 - RNA, 21 nt, Artificial Sequence
  Synthetic oligonucleotide
  hsa-miR-3622b-3p MIMAT0018006
ucaccugagcucccgugccug

SEQ ID NO: 189 - RNA, 21 nt, Artificial Sequence
  Synthetic oligonucleotide
  hsa-miR-4493 MIMAT0019028
agaaggccuuuccaucucugu

SEQ ID NO: 190 - RNA, 21 nt, Artificial Sequence
  Synthetic oligonucleotide
  hsa-miR-1250-5p MIMAT0005902
acggugcuggauguggccuuu

SEQ ID NO: 191 - RNA, 22 nt, Artificial Sequence
  Synthetic oligonucleotide
  hsa-miR-3622a-5p MIMAT0018003
caggcacgggagcucaggugag

SEQ ID NO: 192 - RNA, 22 nt, Artificial Sequence
  Synthetic oligonucleotide
  hsa-miR-381-3p MIMAT0000736
uauacaagggcaagcucucugu

SEQ ID NO: 193 - RNA, 23 nt, Artificial Sequence
  Synthetic oligonucleotide
  hsa-miR-4709-3p MIMAT0019812
uugaagaggaggugcucuguagc

SEQ ID NO: 194 - RNA, 21 nt, Artificial Sequence
  Synthetic oligonucleotide
  hsa-miR-7159-5p MIMAT0028228
uucaacaaggguguaggaugg

SEQ ID NO: 195 - RNA, 23 nt, Artificial Sequence
  Synthetic oligonucleotide
  hsa-miR-6738-5p MIMAT0027377
cgagggguagaagagcacagggg

SEQ ID NO: 196 - RNA, 22 nt, Artificial Sequence
  Synthetic oligonucleotide
  hsa-miR-374b-3p MIMAT0004956
cuuagcagguuguauuaucauu

SEQ ID NO: 197 - RNA, 23 nt, Artificial Sequence
  Synthetic oligonucleotide
  hsa-miR-6874-3p MIMAT0027649
caguucugcuguucugacucuag

SEQ ID NO: 198 - RNA, 22 nt, Artificial Sequence
  Synthetic oligonucleotide
  hsa-miR-448 MIMAT0001532
uugcauauguaggaugucccau

SEQ ID NO: 199 - RNA, 23 nt, Artificial Sequence
  Synthetic oligonucleotide
  hsa-miR-548s MIMAT0014987
auggccaaaacugcaguuauuuu

SEQ ID NO: 200 - RNA, 24 nt, Artificial Sequence
  Synthetic oligonucleotide
  hsa-miR-515-5p MIMAT0002826
uucuccaaaagaaagcacuuucug

SEQ ID NO: 201 - RNA, 19 nt, Artificial Sequence
  Synthetic oligonucleotide
  hsa-miR-6891-5p MIMAT0027682
uaaggagggggaugagggg

SEQ ID NO: 202 - RNA, 20 nt, Artificial Sequence
  Synthetic oligonucleotide
  hsa-miR-3940-5p MIMAT0019229
guggguuggggcgggcucug

SEQ ID NO: 203 - RNA, 22 nt, Artificial Sequence
  Synthetic oligonucleotide
  hsa-miR-431-3p MIMAT0004757
caggucgucuugcagggcuucu

SEQ ID NO: 204 - RNA, 23 nt, Artificial Sequence
  Synthetic oligonucleotide
  hsa-miR-6832-5p MIMAT0027564
aguagagaggaaaaguuaggguc

SEQ ID NO: 205 - RNA, 23 nt, Artificial Sequence
  Synthetic oligonucleotide
  hsa-miR-103a-2-5p MIMAT0009196
agcuucuuuacagugcugccuug

SEQ ID NO: 206 - RNA, 22 nt, Artificial Sequence
  Synthetic oligonucleotide
  hsa-miR-6877-5p MIMAT0027654
agggccgaaggguggaagcugc

SEQ ID NO: 207 - RNA, 21 nt, Artificial Sequence
  Synthetic oligonucleotide
  hsa-miR-1298-3p MIMAT0026641
caucugggcaacugacugaac

SEQ ID NO: 208 - RNA, 22 nt, Artificial Sequence
  Synthetic oligonucleotide
  hsa-miR-3682-5p MIMAT0019222
cuacuucuaccuguguuaucau

SEQ ID NO: 209 - RNA, 21 nt, Artificial Sequence
  Synthetic oligonucleotide
  hsa-miR-3155a MIMAT0015029
ccaggcucugcagugggaacu

SEQ ID NO: 210 - RNA, 21 nt, Artificial Sequence
  Synthetic oligonucleotide
  hsa-miR-5089-5p MIMAT0021081
gugggauuucugaguagcauc

SEQ ID NO: 211 - RNA, 19 nt, Artificial Sequence
  Synthetic oligonucleotide
  hsa-miR-648 MIMAT0003318
aagugugcagggcacuggu

SEQ ID NO: 212 - RNA, 22 nt, Artificial Sequence
  Synthetic oligonucleotide
  hsa-miR-367-5p MIMAT0004686
acuguugcuaauaugcaacucu

SEQ ID NO: 213 - RNA, 22 nt, Artificial Sequence
  Synthetic oligonucleotide
  hsa-miR-6740-5p MIMAT0027381
aguuugggauggagagaggaga

SEQ ID NO: 214 - RNA, 22 nt, Artificial Sequence
  Synthetic oligonucleotide
  hsa-miR-450a-2-3p MIMAT0031074
auuggggacauuuugcauucau

SEQ ID NO: 215 - RNA, 20 nt, Artificial Sequence
  Synthetic oligonucleotide
  hsa-miR-6793-3p MIMAT0027487
uccccaaccccugcccgcag

SEQ ID NO: 216 - RNA, 22 nt, Artificial Sequence
  Synthetic oligonucleotide
  hsa-miR-3622a-3p MIMAT0018004
ucaccugaccucccaugccugu

SEQ ID NO: 217 - RNA, 25 nt, Artificial Sequence
  Synthetic oligonucleotide
  hsa-miR-541-5p MIMAT0004919
aaaggauucugcugucggucccacu

SEQ ID NO: 218 - RNA, 20 nt, Artificial Sequence
  Synthetic oligonucleotide
  hsa-miR-6515-3p MIMAT0025487
ucucuucaucuaccccccag

SEQ ID NO: 219 - RNA, 20 nt, Artificial Sequence
  Synthetic oligonucleotide
  hsa-miR-1276 MIMAT0005930
uaaagagcccuguggagaca

SEQ ID NO: 220 - RNA, 22 nt, Artificial Sequence
  Synthetic oligonucleotide
  hsa-miR-6499-3p MIMAT0025451
agcaguguuuguuuugcccaca

SEQ ID NO: 221 - RNA, 22 nt, Artificial Sequence
  Synthetic oligonucleotide
  hsa-miR-2276-3p MIMAT0011775
ucugcaagugucagaggcgagg

SEQ ID NO: 222 - RNA, 21 nt, Artificial Sequence
  Synthetic oligonucleotide
  hsa-miR-3120-3p MIMAT0014982
cacagcaaguguagacaggca

SEQ ID NO: 223 - RNA, 23 nt, Artificial Sequence
  Synthetic oligonucleotide
  hsa-miR-6780b-5p MIMAT0027572
uggggaaggcuuggcagggaaga

SEQ ID NO: 224 - RNA, 24 nt, Artificial Sequence
  Synthetic oligonucleotide
  hsa-miR-4769-5p MIMAT0019922
ggugggauggagagaagguaugag

SEQ ID NO: 225 - RNA, 22 nt, Artificial Sequence
  Synthetic oligonucleotide
  hsa-miR-1306-5p MIMAT0022726
ccaccuccccugcaaacgucca

SEQ ID NO: 226 - RNA, 22 nt, Artificial Sequence
  Synthetic oligonucleotide
  hsa-miR-519b-3p MIMAT0002837
aaagugcauccuuuuagagguu

SEQ ID NO: 227 - RNA, 22 nt, Artificial Sequence
  Synthetic oligonucleotide
  hsa-miR-489-3p MIMAT0002805
gugacaucacauauacggcagc

SEQ ID NO: 228 - RNA, 21 nt, Artificial Sequence
  Synthetic oligonucleotide
  hsa-miR-23a-3p MIMAT0000078
aucacauugccagggauuucc

SEQ ID NO: 229 - RNA, 23 nt, Artificial Sequence
  Synthetic oligonucleotide
  hsa-miR-6796-5p MIMAT0027492
uugugggguuggagagcuggcug

SEQ ID NO: 230 - RNA, 20 nt, Artificial Sequence
  Synthetic oligonucleotide
  hsa-miR-675-3p MIMAT0006790
cuguaugcccucaccgcuca

SEQ ID NO: 231 - RNA, 22 nt, Artificial Sequence
  Synthetic oligonucleotide
  hsa-miR-2110 MIMAT0010133
uuggggaaacggccgcugagug

SEQ ID NO: 232 - RNA, 22 nt, Artificial Sequence
  Synthetic oligonucleotide
  hsa-miR-1269a MIMAT0005923
cuggacugagccgugcuacugg

SEQ ID NO: 233 - RNA, 21 nt, Artificial Sequence
  Synthetic oligonucleotide
  hsa-miR-483-3p MIMAT0002173
ucacuccucuccucccgucuu

SEQ ID NO: 234 - RNA, 22 nt, Artificial Sequence
  Synthetic oligonucleotide
  hsa-miR-4659a-3p MIMAT0019727
uuucuucuuagacauggcaacg

SEQ ID NO: 235 - RNA, 22 nt, Artificial Sequence
  Synthetic oligonucleotide
  hsa-miR-146a-5p MIMAT0000449
ugagaacugaauuccauggguu

SEQ ID NO: 236 - RNA, 23 nt, Artificial Sequence
  Synthetic oligonucleotide
  hsa-miR-1289 MIMAT0005879
uggaguccaggaaucugcauuuu

SEQ ID NO: 237 - RNA, 21 nt, Artificial Sequence
  Synthetic oligonucleotide
  hsa-miR-8485 MIMAT0033692
cacacacacacacacacguau

SEQ ID NO: 238 - RNA, 19 nt, Artificial Sequence
  Synthetic oligonucleotide
  hsa-miR-563 MIMAT0003227
agguugacauacguuuccc

SEQ ID NO: 239 - RNA, 22 nt, Artificial Sequence
  Synthetic oligonucleotide
  hsa-miR-425-3p MIMAT0001343
aucgggaaugucguguccgccc

SEQ ID NO: 240 - RNA, 22 nt, Artificial Sequence
  Synthetic oligonucleotide
  hsa-miR-4474-3p MIMAT0019001
uuguggcuggucaugaggcuaa

SEQ ID NO: 241 - RNA, 24 nt, Artificial Sequence
  Synthetic oligonucleotide
  hsa-miR-5002-5p MIMAT0021023
aauuugguuucugaggcacuuagu

SEQ ID NO: 242 - RNA, 23 nt, Artificial Sequence
  Synthetic oligonucleotide
  hsa-miR-3672 MIMAT0018095
augagacucauguaaaacaucuu

SEQ ID NO: 243 - RNA, 21 nt, Artificial Sequence
  Synthetic oligonucleotide
  hsa-let-7a-3p MIMAT0004481
cuauacaaucuacugucuuuc

SEQ ID NO: 244 - RNA, 18 nt, Artificial Sequence
  Synthetic oligonucleotide
  hsa-miR-4488 MIMAT0019022
agggggcgggcuccggcg

SEQ ID NO: 245 - RNA, 23 nt, Artificial Sequence
  Synthetic oligonucleotide
  hsa-miR-3691-5p MIMAT0018120
aguggaugauggagacucgguac

SEQ ID NO: 246 - RNA, 21 nt, Artificial Sequence
  Synthetic oligonucleotide
  hsa-miR-3688-5p MIMAT0019223
aguggcaaagucuuuccauau

SEQ ID NO: 247 - RNA, 22 nt, Artificial Sequence
  Synthetic oligonucleotide
  hsa-miR-532-3p MIMAT0004780
ccucccacacccaaggcuugca

SEQ ID NO: 248 - RNA, 22 nt, Artificial Sequence
  Synthetic oligonucleotide
  hsa-miR-4747-5p MIMAT0019882
agggaaggaggcuuggucuuag

SEQ ID NO: 249 - RNA, 21 nt, Artificial Sequence
  Synthetic oligonucleotide
  hsa-miR-6813-3p MIMAT0027527
aaccuuggccccucuccccag

SEQ ID NO: 250 - RNA, 18 nt, Artificial Sequence
  Synthetic oligonucleotide
  hsa-miR-3653-3p MIMAT0018073
cuaagaaguugacugaag

SEQ ID NO: 251 - RNA, 21 nt, Artificial Sequence
  Synthetic oligonucleotide
  hsa-miR-3150b-3p MIMAT0018194
ugaggagaucgucgagguugg

SEQ ID NO: 252 - RNA, 22 nt, Artificial Sequence
  Synthetic oligonucleotide
  hsa-miR-6858-5p MIMAT0027616
gugaggaggggcuggcagggac

SEQ ID NO: 253 - RNA, 24 nt, Artificial Sequence
  Synthetic oligonucleotide
  hsa-miR-6768-3p MIMAT0027437
caaaggccacauucuccugugcac

SEQ ID NO: 254 - RNA, 21 nt, Artificial Sequence
  Synthetic oligonucleotide
  hsa-miR-4797-3p MIMAT0019973
ucucaguaaguggcacucugu

SEQ ID NO: 255 - RNA, 22 nt, Artificial Sequence
  Synthetic oligonucleotide
  hsa-miR-4684-5p MIMAT0019769
cucucuacugacuugcaacaua

SEQ ID NO: 256 - RNA, 21 nt, Artificial Sequence
  Synthetic oligonucleotide
  hsa-miR-4638-5p MIMAT0019695
acucggcugcgguggacaagu

SEQ ID NO: 257 - RNA, 18 nt, Artificial Sequence
  Synthetic oligonucleotide
  hsa-miR-4300 MIMAT0016853
ugggagcuggacuacuuc

SEQ ID NO: 258 - RNA, 21 nt, Artificial Sequence
  Synthetic oligonucleotide
  hsa-miR-6868-3p MIMAT0027637
uuccuucuguugucugugcag

SEQ ID NO: 259 - RNA, 22 nt, Artificial Sequence
  Synthetic oligonucleotide
  hsa-miR-101-5p MIMAT0004513
caguuaucacagugcugaugcu

SEQ ID NO: 260 - RNA, 21 nt, Artificial Sequence
  Synthetic oligonucleotide
  hsa-miR-4650-3p MIMAT0019714
agguagaaugaggccugacau

SEQ ID NO: 261 - RNA, 21 nt, Artificial Sequence
  Synthetic oligonucleotide
  hsa-miR-6771-3p MIMAT0027443
caaaccccugucuacccgcag

SEQ ID NO: 262 - RNA, 21 nt, Artificial Sequence
  Synthetic oligonucleotide
  hsa-miR-6748-3p MIMAT0027397
uccugucccugucuccuacag

SEQ ID NO: 263 - RNA, 27 nt, Artificial Sequence
  Synthetic oligonucleotide
  hsa-miR-1248 MIMAT0005900
accuucuuguauaagcacugugcuaaa

SEQ ID NO: 264 - RNA, 17 nt, Artificial Sequence
  Synthetic oligonucleotide
  hsa-miR-4463 MIMAT0018987
gagacugggguggggcc

SEQ ID NO: 265 - RNA, 20 nt, Artificial Sequence
  Synthetic oligonucleotide
  hsa-miR-6794-5p MIMAT0027488
cagggggacugggggugagc

SEQ ID NO: 266 - RNA, 21 nt, Artificial Sequence
  Synthetic oligonucleotide
  hsa-miR-4763-5p MIMAT0019912
cgccugcccagcccuccugcu

SEQ ID NO: 267 - RNA, 19 nt, Artificial Sequence
  Synthetic oligonucleotide
  hsa-miR-6132 MIMAT0024616
agcagggcuggggauugca

SEQ ID NO: 268 - RNA, 18 nt, Artificial Sequence
  Synthetic oligonucleotide
  hsa-miR-1306-3p MIMAT0005950
acguuggcucugguggug

SEQ ID NO: 269 - RNA, 22 nt, Artificial Sequence
  Synthetic oligonucleotide
  hsa-miR-579-5p MIMAT0026616
ucgcgguuugugccagaugacg

SEQ ID NO: 270 - RNA, 20 nt, Artificial Sequence
  Synthetic oligonucleotide
  hsa-miR-3917 MIMAT0018191
gcucggacugagcagguggg

SEQ ID NO: 271 - RNA, 23 nt, Artificial Sequence
  Synthetic oligonucleotide
  hsa-miR-4793-3p MIMAT0019966
ucugcacugugaguuggcuggcu

SEQ ID NO: 272 - RNA, 19 nt, Artificial Sequence
  Synthetic oligonucleotide
  hsa-miR-575 MIMAT0003240
gagccaguuggacaggagc

SEQ ID NO: 273 - RNA, 22 nt, Artificial Sequence
  Synthetic oligonucleotide
  hsa-miR-496 MIMAT0002818
ugaguauuacauggccaaucuc

SEQ ID NO: 274 - RNA, 20 nt, Artificial Sequence
  Synthetic oligonucleotide
  hsa-miR-320c MIMAT0005793
aaaagcuggguugagagggu

SEQ ID NO: 275 - RNA, 22 nt, Artificial Sequence
  Synthetic oligonucleotide
  hsa-miR-6818-3p MIMAT0027537
uugucucuuguuccucacacag

SEQ ID NO: 276 - RNA, 21 nt, Artificial Sequence
  Synthetic oligonucleotide
  hsa-miR-3162-3p MIMAT0019213
ucccuaccccuccacucccca

SEQ ID NO: 277 - RNA, 24 nt, Artificial Sequence
  Synthetic oligonucleotide
  hsa-miR-661 MIMAT0003324
ugccugggucucuggccugcgcgu

SEQ ID NO: 278 - RNA, 25 nt, Artificial Sequence
  Synthetic oligonucleotide
  hsa-miR-6797-5p MIMAT0027494
aggagggaaggggcugagaacagga

SEQ ID NO: 279 - RNA, 23 nt, Artificial Sequence
  Synthetic oligonucleotide
  hsa-miR-5705 MIMAT0022499
uguuucggggcucauggccugug

SEQ ID NO: 280 - RNA, 22 nt, Artificial Sequence
  Synthetic oligonucleotide
  hsa-miR-6767-3p MIMAT0027435
ccacgugcuucucuuuccgcag

SEQ ID NO: 281 - RNA, 23 nt, Artificial Sequence
  Synthetic oligonucleotide
  hsa-miR-4722-5p MIMAT0019836
ggcaggagggcugugccagguug

SEQ ID NO: 282 - RNA, 22 nt, Artificial Sequence
  Synthetic oligonucleotide
  hsa-miR-4477a MIMAT0019004
cuauuaaggacauuugugauuc

SEQ ID NO: 283 - RNA, 22 nt, Artificial Sequence
  Synthetic oligonucleotide
  hsa-miR-375 MIMAT0000728
uuuguucguucggcucgcguga

SEQ ID NO: 284 - RNA, 21 nt, Artificial Sequence
  Synthetic oligonucleotide
  hsa-miR-424-3p MIMAT0004749
caaaacgugaggcgcugcuau

SEQ ID NO: 285 - RNA, 22 nt, Artificial Sequence
  Synthetic oligonucleotide
  hsa-miR-499b-3p MIMAT0019898
aacaucacugcaagucuuaaca

SEQ ID NO: 286 - RNA, 24 nt, Artificial Sequence
  Synthetic oligonucleotide
  hsa-miR-1277-5p MIMAT0022724
aaauauauauauauauguacguau

SEQ ID NO: 287 - RNA, 23 nt, Artificial Sequence
  Synthetic oligonucleotide
  hsa-miR-1238-5p MIMAT0022947
gugagugggagccccagugugug

SEQ ID NO: 288 - RNA, 22 nt, Artificial Sequence
  Synthetic oligonucleotide
  hsa-miR-4799-5p MIMAT0019976
aucuaaaugcagcaugccaguc

SEQ ID NO: 289 - RNA, 21 nt, Artificial Sequence
  Synthetic oligonucleotide
  hsa-miR-3074-5p MIMAT0019208
guuccugcugaacugagccag

SEQ ID NO: 290 - RNA, 21 nt, Artificial Sequence
  Synthetic oligonucleotide
  hsa-miR-95-5p MIMAT0026473
ucaauaaaugucuguugaauu

SEQ ID NO: 291 - RNA, 23 nt, Artificial Sequence
  Synthetic oligonucleotide
  hsa-miR-7157-5p MIMAT0028224
ucagcauucauuggcaccagaga

SEQ ID NO: 292 - RNA, 21 nt, Artificial Sequence
  Synthetic oligonucleotide
  hsa-miR-4436a MIMAT0018952
gcaggacaggcagaaguggau

SEQ ID NO: 293 - DNA, 19 bp, Artificial Sequence
  Synthetic oligonucleotide
  hsa-miR-4634 MIMAT0019691
cggcgcgaccggcccgggg

SEQ ID NO: 294 - RNA, 24 nt, Artificial Sequence
  Synthetic oligonucleotide
  hsa-miR-664b-5p MIMAT0022271
ugggcuaagggagaugauugggua

SEQ ID NO: 295 - RNA, 21 nt, Artificial Sequence
  Synthetic oligonucleotide
  hsa-miR-4525 MIMAT0019064
ggggggaugugcaugcugguu

SEQ ID NO: 296 - RNA, 21 nt, Artificial Sequence
  Synthetic oligonucleotide
  hsa-miR-486-3p MIMAT0004762
cggggcagcucaguacaggau

SEQ ID NO: 297 - RNA, 22 nt, Artificial Sequence
  Synthetic oligonucleotide
  hsa-miR-302c-5p MIMAT0000716
uuuaacauggggguaccugcug

SEQ ID NO: 298 - RNA, 22 nt, Artificial Sequence
  Synthetic oligonucleotide
  hsa-miR-449a MIMAT0001541
uggcaguguauuguuagcuggu

SEQ ID NO: 299 - RNA, 24 nt, Artificial Sequence
  Synthetic oligonucleotide
  hsa-miR-5001-5p MIMAT0021021
agggcuggacucagcggcggagcu

SEQ ID NO: 300 - RNA, 22 nt, Artificial Sequence
  Synthetic oligonucleotide
  hsa-miR-4765 MIMAT0019916
ugagugauugauagcuauguuc

SEQ ID NO: 301 - RNA, 22 nt, Artificial Sequence
  Synthetic oligonucleotide
  hsa-miR-3619-5p MIMAT0017999
ucagcaggcaggcuggugcagc

SEQ ID NO: 302 - RNA, 21 nt, Artificial Sequence
  Synthetic oligonucleotide
  hsa-miR-7113-5p MIMAT0028123
uccagggagacagugugugag

SEQ ID NO: 303 - RNA, 22 nt, Artificial Sequence
  Synthetic oligonucleotide
  hsa-miR-766-3p MIMAT0003888
acuccagccccacagccucagc

SEQ ID NO: 304 - RNA, 22 nt, Artificial Sequence
  Synthetic oligonucleotide
  hsa-miR-487b-3p MIMAT0003180
aaucguacagggucauccacuu

SEQ ID NO: 305 - RNA, 23 nt, Artificial Sequence
  Synthetic oligonucleotide
  hsa-miR-330-3p MIMAT0000751
gcaaagcacacggccugcagaga

SEQ ID NO: 306 - RNA, 18 nt, Artificial Sequence
  Synthetic oligonucleotide
  hsa-miR-4257 MIMAT0016878
ccagagguggggacugag

SEQ ID NO: 307 - RNA, 17 nt, Artificial Sequence
  Synthetic oligonucleotide
  hsa-miR-4264 MIMAT0016899
acucagucauggucauu

SEQ ID NO: 308 - RNA, 22 nt, Artificial Sequence
  Synthetic oligonucleotide
  hsa-miR-489-5p MIMAT0026605
ggucguaugugugacgccauuu

SEQ ID NO: 309 - RNA, 22 nt, Artificial Sequence
  Synthetic oligonucleotide
  hsa-miR-92b-5p MIMAT0004792
agggacgggacgcggugcagug

SEQ ID NO: 310 - RNA, 20 nt, Artificial Sequence
  Synthetic oligonucleotide
  hsa-miR-6829-3p MIMAT0027559
ugccuccuccguggccucag

SEQ ID NO: 311 - RNA, 22 nt, Artificial Sequence
  Synthetic oligonucleotide
  hsa-miR-6766-3p MIMAT0027433
ugauugucuucccccacccuca

SEQ ID NO: 312 - RNA, 22 nt, Artificial Sequence
  Synthetic oligonucleotide
  hsa-miR-5584-5p MIMAT0022283
cagggaaaugggaagaacuaga

SEQ ID NO: 313 - RNA, 18 nt, Artificial Sequence
  Synthetic oligonucleotide
  hsa-miR-4710 MIMAT0019815
gggugagggcaggugguu

SEQ ID NO: 314 - RNA, 20 nt, Artificial Sequence
  Synthetic oligonucleotide
  hsa-miR-3910 MIMAT0018184
aaaggcauaaaaccaagaca

SEQ ID NO: 315 - RNA, 22 nt, Artificial Sequence
  Synthetic oligonucleotide
  hsa-miR-885-5p MIMAT0004947
uccauuacacuacccugccucu

SEQ ID NO: 316 - RNA, 17 nt, Artificial Sequence
  Synthetic oligonucleotide
  hsa-miR-302e MIMAT0005931
uaagugcuuccaugcuu

SEQ ID NO: 317 - RNA, 23 nt, Artificial Sequence
  Synthetic oligonucleotide
  hsa-miR-4715-3p MIMAT0019825
gugccaccuuaacugcagccaau

SEQ ID NO: 318 - RNA, 20 nt, Artificial Sequence
  Synthetic oligonucleotide
  hsa-miR-1282 MIMAT0005940
ucguuugccuuuuucugcuu

SEQ ID NO: 319 - RNA, 21 nt, Artificial Sequence
  Synthetic oligonucleotide
  hsa-miR-3124-5p MIMAT0014986
uucgcgggcgaaggcaaaguc

SEQ ID NO: 320 - RNA, 22 nt, Artificial Sequence
  Synthetic oligonucleotide
  hsa-miR-4750-5p MIMAT0019887
cucgggcggaggugguugagug

SEQ ID NO: 321 - RNA, 22 nt, Artificial Sequence
  Synthetic oligonucleotide
  hsa-miR-191-3p MIMAT0001618
gcugcgcuuggauuucgucccc

SEQ ID NO: 322 - RNA, 21 nt, Artificial Sequence
  Synthetic oligonucleotide
  hsa-miR-6841-3p MIMAT0027585
accuugcaucugcauccccag

SEQ ID NO: 323 - RNA, 19 nt, Artificial Sequence
  Synthetic oligonucleotide
  hsa-miR-1301-5p MIMAT0026639
cgcucuaggcaccgcagca

SEQ ID NO: 324 - RNA, 22 nt, Artificial Sequence
  Synthetic oligonucleotide
  hsa-miR-3928-3p MIMAT0018205
ggaggaaccuuggagcuucggc

SEQ ID NO: 325 - RNA, 20 nt, Artificial Sequence
  Synthetic oligonucleotide
  hsa-miR-6799-5p MIMAT0027498
ggggaggugugcagggcugg

SEQ ID NO: 326 - RNA, 22 nt, Artificial Sequence
  Synthetic oligonucleotide
  hsa-miR-20a-3p MIMAT0004493
acugcauuaugagcacuuaaag

SEQ ID NO: 327 - RNA, 22 nt, Artificial Sequence
  Synthetic oligonucleotide
  hsa-miR-6787-3p MIMAT0027475
ucucagcugcugcccucuccag

SEQ ID NO: 328 - DNA, 20 bp, Artificial Sequence
  Synthetic oligonucleotide
  hsa-miR-1915-3p MIMAT0007892
ccccagggcgacgcggcggg

SEQ ID NO: 329 - RNA, 22 nt, Artificial Sequence
  Synthetic oligonucleotide
  hsa-miR-603 MIMAT0003271
cacacacugcaauuacuuuugc

SEQ ID NO: 330 - RNA, 22 nt, Artificial Sequence
  Synthetic oligonucleotide
  hsa-miR-32-5p MIMAT0000090
uauugcacauuacuaaguugca

SEQ ID NO: 331 - RNA, 22 nt, Artificial Sequence
  Synthetic oligonucleotide
  hsa-miR-5706 MIMAT0022500
uucuggauaacaugcugaagcu

SEQ ID NO: 332 - RNA, 22 nt, Artificial Sequence
  Synthetic oligonucleotide
  hsa-miR-6778-5p MIMAT0027456
agugggaggacaggaggcaggu

SEQ ID NO: 333 - RNA, 24 nt, Artificial Sequence
  Synthetic oligonucleotide
  hsa-miR-1301-3p MIMAT0005797
uugcagcugccugggagugacuuc

SEQ ID NO: 334 - RNA, 19 nt, Artificial Sequence
  Synthetic oligonucleotide
  hsa-miR-1273f MIMAT0020601
ggagauggagguugcagug

SEQ ID NO: 335 - RNA, 22 nt, Artificial Sequence
  Synthetic oligonucleotide
  hsa-miR-4777-5p MIMAT0019934
uucuagaugagagauauauaua

SEQ ID NO: 336 - RNA, 22 nt, Artificial Sequence
  Synthetic oligonucleotide
  hsa-miR-3938 MIMAT0018353
aauucccuuguagauaacccgg

SEQ ID NO: 337 - RNA, 23 nt, Artificial Sequence
  Synthetic oligonucleotide
  hsa-miR-371b-3p MIMAT0019893
aagugcccccacaguuugagugc

SEQ ID NO: 338 - RNA, 23 nt, Artificial Sequence
  Synthetic oligonucleotide
  hsa-miR-7112-3p MIMAT0028122
ugcaucacagccuuuggcccuag

SEQ ID NO: 339 - RNA, 22 nt, Artificial Sequence
  Synthetic oligonucleotide
  hsa-miR-370-3p MIMAT0000722
gccugcugggguggaaccuggu

SEQ ID NO: 340 - RNA, 22 nt, Artificial Sequence
  Synthetic oligonucleotide
  hsa-miR-574-3p MIMAT0003239
cacgcucaugcacacacccaca

SEQ ID NO: 341 - RNA, 24 nt, Artificial Sequence
  Synthetic oligonucleotide
  hsa-miR-4751 MIMAT0019888
agaggacccguagcugcuagaagg

SEQ ID NO: 342 - RNA, 20 nt, Artificial Sequence
  Synthetic oligonucleotide
  hsa-miR-8071 MIMAT0030998
cgguggacuggagugggugg

SEQ ID NO: 343 - RNA, 22 nt, Artificial Sequence
  Synthetic oligonucleotide
  hsa-miR-23a-5p MIMAT0004496
gggguuccuggggaugggauuu

SEQ ID NO: 344 - RNA, 23 nt, Artificial Sequence
  Synthetic oligonucleotide
  hsa-miR-329-5p MIMAT0026555
gagguuuucuggguuucuguuuc

SEQ ID NO: 345 - RNA, 23 nt, Artificial Sequence
  Synthetic oligonucleotide
  hsa-miR-372-3p MIMAT0000724
aaagugcugcgacauuugagcgu

SEQ ID NO: 346 - RNA, 22 nt, Artificial Sequence
  Synthetic oligonucleotide
  hsa-miR-4479 MIMAT0019011
cgcgcggccgugcucggagcag

SEQ ID NO: 347 - RNA, 22 nt, Artificial Sequence
  Synthetic oligonucleotide
  hsa-miR-105-3p MIMAT0004516
acggauguuugagcaugugcua

SEQ ID NO: 348 - RNA, 20 nt, Artificial Sequence
  Synthetic oligonucleotide
  hsa-miR-4326 MIMAT0016888
uguuccucugucucccagac

SEQ ID NO: 349 - RNA, 22 nt, Artificial Sequence
  Synthetic oligonucleotide
  hsa-let-7b-5p MIMAT0000063
ugagguaguagguugugugguu

SEQ ID NO: 350 - RNA, 23 nt, Artificial Sequence
  Synthetic oligonucleotide
  hsa-miR-6751-5p MIMAT0027402
uugggggugagguuggugucugg

SEQ ID NO: 351 - RNA, 21 nt, Artificial Sequence
  Synthetic oligonucleotide
  hsa-miR-3192-3p MIMAT0027027
cucugaucgcccucucagcuc

SEQ ID NO: 352 - RNA, 22 nt, Artificial Sequence
  Synthetic oligonucleotide
  hsa-miR-6856-3p MIMAT0027613
uacagcccugugaucuuuccag

SEQ ID NO: 353 - RNA, 22 nt, Artificial Sequence
  Synthetic oligonucleotide
  hsa-miR-6807-5p MIMAT0027514
gugagccaguggaauggagagg

SEQ ID NO: 354 - RNA, 25 nt, Artificial Sequence
  Synthetic oligonucleotide
  hsa-miR-6735-5p MIMAT0027371
cagggcagagggcacaggaaucuga

SEQ ID NO: 355 - RNA, 22 nt, Artificial Sequence
  Synthetic oligonucleotide
  hsa-miR-5680 MIMAT0022468
gagaaaugcuggacuaaucugc

SEQ ID NO: 356 - RNA, 22 nt, Artificial Sequence
  Synthetic oligonucleotide
  hsa-miR-30a-5p MIMAT0000087
uguaaacauccucgacuggaag

SEQ ID NO: 357 - RNA, 21 nt, Artificial Sequence
  Synthetic oligonucleotide
  hsa-miR-1207-5p MIMAT0005871
uggcagggaggcugggagggg

SEQ ID NO: 358 - RNA, 21 nt, Artificial Sequence
  Synthetic oligonucleotide
  hsa-miR-6844 MIMAT0027589
uucuuuguuuuuaauucacag

SEQ ID NO: 359 - RNA, 21 nt, Artificial Sequence
  Synthetic oligonucleotide
  hsa-miR-4438 MIMAT0018956
cacaggcuuagaaaagacagu

SEQ ID NO: 360 - RNA, 21 nt, Artificial Sequence
  Synthetic oligonucleotide
  hsa-miR-3189-3p MIMAT0015071
cccuugggucugaugggguag

SEQ ID NO: 361 - RNA, 22 nt, Artificial Sequence
  Synthetic oligonucleotide
  hsa-miR-6880-5p MIMAT0027660
ugguggaggaagagggcagcuc

SEQ ID NO: 362 - RNA, 23 nt, Artificial Sequence
  Synthetic oligonucleotide
  hsa-miR-6805-3p MIMAT0027511
uugcucugcucccccgcccccag

SEQ ID NO: 363 - RNA, 22 nt, Artificial Sequence
  Synthetic oligonucleotide
  hsa-miR-302b-5p MIMAT0000714
acuuuaacauggaagugcuuuc

SEQ ID NO: 364 - RNA, 23 nt, Artificial Sequence
  Synthetic oligonucleotide
  hsa-miR-623 MIMAT0003292
aucccuugcaggggcuguugggu

SEQ ID NO: 365 - RNA, 21 nt, Artificial Sequence
  Synthetic oligonucleotide
  hsa-miR-875-3p MIMAT0004923
ccuggaaacacugagguugug

SEQ ID NO: 366 - RNA, 21 nt, Artificial Sequence
  Synthetic oligonucleotide
  hsa-miR-6869-3p MIMAT0027639
cgccgcgcgcaucggcucagc

SEQ ID NO: 367 - RNA, 23 nt, Artificial Sequence
  Synthetic oligonucleotide
  hsa-miR-657 MIMAT0003335
ggcagguucucacccucucuagg

SEQ ID NO: 368 - RNA, 22 nt, Artificial Sequence
  Synthetic oligonucleotide
  hsa-miR-4689 MIMAT0019778
uugaggagacauggugggggcc

SEQ ID NO: 369 - RNA, 22 nt, Artificial Sequence
  Synthetic oligonucleotide
  hsa-miR-136-3p MIMAT0004606
caucaucgucucaaaugagucu

SEQ ID NO: 370 - RNA, 22 nt, Artificial Sequence
  Synthetic oligonucleotide
  hsa-miR-519a-3p MIMAT0002869
aaagugcauccuuuuagagugu

SEQ ID NO: 371 - RNA, 21 nt, Artificial Sequence
  Synthetic oligonucleotide
  hsa-miR-5003-3p MIMAT0021026
uacuuuucuagguuguugggg

SEQ ID NO: 372 - RNA, 22 nt, Artificial Sequence
  Synthetic oligonucleotide
  hsa-miR-576-5p MIMAT0003241
auucuaauuucuccacgucuuu

SEQ ID NO: 373 - RNA, 23 nt, Artificial Sequence
  Synthetic oligonucleotide
  hsa-miR-371a-3p MIMAT0000723
aagugccgccaucuuuugagugu

SEQ ID NO: 374 - RNA, 23 nt, Artificial Sequence
  Synthetic oligonucleotide
  hsa-miR-6762-3p MIMAT0027425
uggcugcuucccuuggucuccag

SEQ ID NO: 375 - RNA, 22 nt, Artificial Sequence
  Synthetic oligonucleotide
  hsa-miR-586 MIMAT0003252
uaugcauuguauuuuuaggucc

SEQ ID NO: 376 - RNA, 21 nt, Artificial Sequence
  Synthetic oligonucleotide
  hsa-miR-621 MIMAT0003290
ggcuagcaacagcgcuuaccu

SEQ ID NO: 377 - RNA, 21 nt, Artificial Sequence
  Synthetic oligonucleotide
  hsa-miR-6791-3p MIMAT0027483
ugccuccuuggucuccggcag

SEQ ID NO: 378 - RNA, 22 nt, Artificial Sequence
  Synthetic oligonucleotide
  hsa-miR-4664-5p MIMAT0019737
uggggugcccacuccgcaaguu

SEQ ID NO: 379 - RNA, 22 nt, Artificial Sequence
  Synthetic oligonucleotide
  hsa-miR-4436b-3p MIMAT0019941
cagggcaggaagaaguggacaa

SEQ ID NO: 380 - RNA, 22 nt, Artificial Sequence
  Synthetic oligonucleotide
  hsa-miR-3150a-5p MIMAT0019206
caaccucgacgaucuccucagc

SEQ ID NO: 381 - RNA, 24 nt, Artificial Sequence
  Synthetic oligonucleotide
  hsa-miR-3692-3p MIMAT0018122
guuccacacugacacugcagaagu

SEQ ID NO: 382 - RNA, 22 nt, Artificial Sequence
  Synthetic oligonucleotide
  hsa-miR-338-5p MIMAT0004701
aacaauauccuggugcugagug

SEQ ID NO: 383 - RNA, 23 nt, Artificial Sequence
  Synthetic oligonucleotide
  hsa-miR-4693-3p MIMAT0019785
ugagaguggaauucacaguauuu

SEQ ID NO: 384 - RNA, 22 nt, Artificial Sequence
  Synthetic oligonucleotide
  hsa-miR-543 MIMAT0004954
aaacauucgcggugcacuucuu

SEQ ID NO: 385 - RNA, 18 nt, Artificial Sequence
  Synthetic oligonucleotide
  hsa-miR-151b MIMAT0010214
ucgaggagcucacagucu

SEQ ID NO: 386 - RNA, 21 nt, Artificial Sequence
  Synthetic oligonucleotide
  hsa-miR-211-3p MIMAT0022694
gcagggacagcaaaggggugc

SEQ ID NO: 387 - RNA, 18 nt, Artificial Sequence
  Synthetic oligonucleotide
  hsa-miR-7150 MIMAT0028211
cuggcagggggagaggua

SEQ ID NO: 388 - RNA, 21 nt, Artificial Sequence
  Synthetic oligonucleotide
  hsa-miR-4445-3p MIMAT0018964
cacggcaaaagaaacaaucca

SEQ ID NO: 389 - RNA, 23 nt, Artificial Sequence
  Synthetic oligonucleotide
  hsa-miR-96-5p MIMAT0000095
uuuggcacuagcacauuuuugcu

SEQ ID NO: 390 - RNA, 21 nt, Artificial Sequence
  Synthetic oligonucleotide
  hsa-miR-5579-5p MIMAT0022269
uaugguacuccuuaagcuaac

SEQ ID NO: 391 - RNA, 22 nt, Artificial Sequence
  Synthetic oligonucleotide
  hsa-miR-887-3p MIMAT0004951
gugaacgggcgccaucccgagg

SEQ ID NO: 392 - RNA, 25 nt, Artificial Sequence
  Synthetic oligonucleotide
  hsa-miR-593-5p MIMAT0003261
aggcaccagccaggcauugcucagc

SEQ ID NO: 393 - RNA, 22 nt, Artificial Sequence
  Synthetic oligonucleotide
  hsa-miR-3689a-5p MIMAT0018117
ugugauaucaugguuccuggga

SEQ ID NO: 394 - RNA, 23 nt, Artificial Sequence
  Synthetic oligonucleotide
  hsa-miR-618 MIMAT0003287
aaacucuacuuguccuucugagu

SEQ ID NO: 395 - RNA, 20 nt, Artificial Sequence
  Synthetic oligonucleotide
  hsa-miR-6504-3p MIMAT0025465
cauuacagcacagccauucu

SEQ ID NO: 396 - RNA, 18 nt, Artificial Sequence
  Synthetic oligonucleotide
  hsa-miR-4282 MIMAT0016912
uaaaauuugcauccagga

SEQ ID NO: 397 - RNA, 20 nt, Artificial Sequence
  Synthetic oligonucleotide
  hsa-miR-1228-3p MIMAT0005583
ucacaccugccucgcccccc

SEQ ID NO: 398 - RNA, 22 nt, Artificial Sequence
  Synthetic oligonucleotide
  hsa-miR-106a-3p MIMAT0004517
cugcaauguaagcacuucuuac

SEQ ID NO: 399 - RNA, 22 nt, Artificial Sequence
  Synthetic oligonucleotide
  hsa-miR-491-5p MIMAT0002807
aguggggaacccuuccaugagg

SEQ ID NO: 400 - RNA, 22 nt, Artificial Sequence
  Synthetic oligonucleotide
  hsa-miR-4685-3p MIMAT0019772
ucucccuuccugcccuggcuag

SEQ ID NO: 401 - RNA, 22 nt, Artificial Sequence
  Synthetic oligonucleotide
  hsa-miR-548al MIMAT0019024
aacggcaaugacuuuuguacca

SEQ ID NO: 402 - RNA, 21 nt, Artificial Sequence
  Synthetic oligonucleotide
  hsa-miR-6765-3p MIMAT0027431
ucaccuggcuggcccgcccag

SEQ ID NO: 403 - RNA, 20 nt, Artificial Sequence
  Synthetic oligonucleotide
  hsa-miR-511-3p MIMAT0026606
aauguguagcaaaagacaga

SEQ ID NO: 404 - RNA, 17 nt, Artificial Sequence
  Synthetic oligonucleotide
  hsa-miR-4286 MIMAT0016916
accccacuccugguacc

SEQ ID NO: 405 - RNA, 20 nt, Artificial Sequence
  Synthetic oligonucleotide
  hsa-miR-627-3p MIMAT0026623
ucuuuucuuugagacucacu

SEQ ID NO: 406 - RNA, 19 nt, Artificial Sequence
  Synthetic oligonucleotide
  hsa-miR-644a MIMAT0003314
aguguggcuuucuuagagc

SEQ ID NO: 407 - RNA, 22 nt, Artificial Sequence
  Synthetic oligonucleotide
  hsa-miR-124-5p MIMAT0004591
cguguucacagcggaccuugau

SEQ ID NO: 408 - RNA, 21 nt, Artificial Sequence
  Synthetic oligonucleotide
  hsa-miR-6887-3p MIMAT0027675
uccccuccacuuuccuccuag

SEQ ID NO: 409 - RNA, 22 nt, Artificial Sequence
  Synthetic oligonucleotide
  hsa-miR-4449 MIMAT0018968
cgucccggggcugcgcgaggca

SEQ ID NO: 410 - RNA, 24 nt, Artificial Sequence
  Synthetic oligonucleotide
  hsa-miR-641 MIMAT0003311
aaagacauaggauagagucaccuc

SEQ ID NO: 411 - RNA, 22 nt, Artificial Sequence
  Synthetic oligonucleotide
  hsa-miR-1285-3p MIMAT0005876
ucugggcaacaaagugagaccu

SEQ ID NO: 412 - RNA, 23 nt, Artificial Sequence
  Synthetic oligonucleotide
  hsa-miR-1193 MIMAT0015049
gggaugguagaccggugacgugc

SEQ ID NO: 413 - RNA, 23 nt, Artificial Sequence
  Synthetic oligonucleotide
  hsa-miR-3153 MIMAT0015026
ggggaaagcgaguagggacauuu

SEQ ID NO: 414 - RNA, 22 nt, Artificial Sequence
  Synthetic oligonucleotide
  hsa-miR-30a-3p MIMAT0000088
cuuucagucggauguuugcagc

SEQ ID NO: 415 - RNA, 19 nt, Artificial Sequence
  Synthetic oligonucleotide
  hsa-miR-4312 MIMAT0016864
ggccuuguuccugucccca

SEQ ID NO: 416 - RNA, 21 nt, Artificial Sequence
  Synthetic oligonucleotide
  hsa-miR-5006-5p MIMAT0021033
uugccagggcaggagguggaa

SEQ ID NO: 417 - RNA, 21 nt, Artificial Sequence
  Synthetic oligonucleotide
  hsa-miR-525-5p MIMAT0002838
cuccagagggaugcacuuucu

SEQ ID NO: 418 - RNA, 20 nt, Artificial Sequence
  Synthetic oligonucleotide
  hsa-miR-6733-3p MIMAT0027368
ucagugucuggauuuccuag

SEQ ID NO: 419 - RNA, 25 nt, Artificial Sequence
  Synthetic oligonucleotide
  hsa-miR-203a-5p MIMAT0031890
agugguucuuaacaguucaacaguu

SEQ ID NO: 420 - RNA, 18 nt, Artificial Sequence
  Synthetic oligonucleotide
  hsa-miR-4711-3p MIMAT0019817
cgugucuucuggcuugau

SEQ ID NO: 421 - RNA, 23 nt, Artificial Sequence
  Synthetic oligonucleotide
  hsa-miR-20b-5p MIMAT0001413
caaagugcucauagugcagguag

SEQ ID NO: 422 - RNA, 22 nt, Artificial Sequence
  Synthetic oligonucleotide
  hsa-miR-5699-5p MIMAT0027103
ugccccaacaaggaaggacaag

SEQ ID NO: 423 - RNA, 18 nt, Artificial Sequence
  Synthetic oligonucleotide
  hsa-miR-1260a MIMAT0005911
aucccaccucugccacca

SEQ ID NO: 424 - RNA, 22 nt, Artificial Sequence
  Synthetic oligonucleotide
  hsa-miR-5692c MIMAT0022476
aauaauaucacaguagguguac

SEQ ID NO: 425 - RNA, 23 nt, Artificial Sequence
  Synthetic oligonucleotide
  hsa-miR-3161 MIMAT0015035
cugauaagaacagaggcccagau

SEQ ID NO: 426 - RNA, 23 nt, Artificial Sequence
  Synthetic oligonucleotide
  hsa-miR-3591-5p MIMAT0019876
uuuagugugauaauggcguuuga

SEQ ID NO: 427 - RNA, 21 nt, Artificial Sequence
  Synthetic oligonucleotide
  hsa-miR-6763-3p MIMAT0027427
cuccccggccucugcccccag

SEQ ID NO: 428 - RNA, 23 nt, Artificial Sequence
  Synthetic oligonucleotide
  hsa-miR-92a-1-5p MIMAT0004507
agguugggaucgguugcaaugcu

SEQ ID NO: 429 - RNA, 23 nt, Artificial Sequence
  Synthetic oligonucleotide
  hsa-miR-548h-3p MIMAT0022723
caaaaaccgcaauuacuuuugca

SEQ ID NO: 430 - RNA, 16 nt, Artificial Sequence
  Synthetic oligonucleotide
  hsa-miR-4297 MIMAT0016846
ugccuuccugucugug

SEQ ID NO: 431 - RNA, 22 nt, Artificial Sequence
  Synthetic oligonucleotide
  hsa-miR-4457 MIMAT0018979
ucacaagguauugacuggcgua

SEQ ID NO: 432 - RNA, 23 nt, Artificial Sequence
  Synthetic oligonucleotide
  hsa-miR-3680-3p MIMAT0018107
uuuugcaugacccugggaguagg

SEQ ID NO: 433 - RNA, 20 nt, Artificial Sequence
  Synthetic oligonucleotide
  hsa-miR-2392 MIMAT0019043
uaggaugggggugagaggug

SEQ ID NO: 434 - RNA, 25 nt, Artificial Sequence
  Synthetic oligonucleotide
  hsa-miR-548t-3p MIMAT0022730
aaaaaccacaauuacuuuugcacca

SEQ ID NO: 435 - RNA, 20 nt, Artificial Sequence
  Synthetic oligonucleotide
  hsa-miR-4784 MIMAT0019948
ugaggagaugcugggacuga

SEQ ID NO: 436 - RNA, 22 nt, Artificial Sequence
  Synthetic oligonucleotide
  hsa-miR-2682-3p MIMAT0013518
cgccucuucagcgcugucuucc

SEQ ID NO: 437 - RNA, 22 nt, Artificial Sequence
  Synthetic oligonucleotide
  hsa-miR-1273c MIMAT0015017
ggcgacaaaacgagacccuguc

SEQ ID NO: 438 - RNA, 22 nt, Artificial Sequence
  Synthetic oligonucleotide
  hsa-miR-7112-5p MIMAT0028121
acgggcagggcagugcacccug

SEQ ID NO: 439 - RNA, 21 nt, Artificial Sequence
  Synthetic oligonucleotide
  hsa-miR-5690 MIMAT0022482
ucagcuacuaccucuauuagg

SEQ ID NO: 440 - RNA, 22 nt, Artificial Sequence
  Synthetic oligonucleotide
  hsa-miR-5011-3p MIMAT0021046
gugcauggcuguauauauaaca

SEQ ID NO: 441 - RNA, 22 nt, Artificial Sequence
  Synthetic oligonucleotide
  hsa-miR-4431 MIMAT0018947
gcgacucugaaaacuagaaggu

SEQ ID NO: 442 - RNA, 18 nt, Artificial Sequence
  Synthetic oligonucleotide
  hsa-miR-4418 MIMAT0018930
cacugcaggacucagcag

SEQ ID NO: 443 - RNA, 22 nt, Artificial Sequence
  Synthetic oligonucleotide
  hsa-miR-891a-5p MIMAT0004902
ugcaacgaaccugagccacuga

SEQ ID NO: 444 - RNA, 20 nt, Artificial Sequence
  Synthetic oligonucleotide
  hsa-miR-378f MIMAT0018932
acuggacuuggagccagaag

SEQ ID NO: 445 - RNA, 22 nt, Artificial Sequence
  Synthetic oligonucleotide
  hsa-miR-183-3p MIMAT0004560
gugaauuaccgaagggccauaa

SEQ ID NO: 446 - RNA, 20 nt, Artificial Sequence
  Synthetic oligonucleotide
  hsa-miR-3119 MIMAT0014981
uggcuuuuaacuuugauggc

SEQ ID NO: 447 - RNA, 22 nt, Artificial Sequence
  Synthetic oligonucleotide
  hsa-miR-4640-3p MIMAT0019700
cacccccuguuuccuggcccac

SEQ ID NO: 448 - RNA, 21 nt, Artificial Sequence
  Synthetic oligonucleotide
  hsa-miR-3606-3p MIMAT0022965
aaaauuucuuucacuacuuag

SEQ ID NO: 449 - RNA, 21 nt, Artificial Sequence
  Synthetic oligonucleotide
  hsa-miR-106b-5p MIMAT0000680
uaaagugcugacagugcagau

SEQ ID NO: 450 - RNA, 22 nt, Artificial Sequence
  Synthetic oligonucleotide
  hsa-miR-4712-5p MIMAT0019818
uccaguacaggucucucauuuc

SEQ ID NO: 451 - RNA, 22 nt, Artificial Sequence
  Synthetic oligonucleotide
  hsa-miR-147b MIMAT0004928
gugugcggaaaugcuucugcua

SEQ ID NO: 452 - RNA, 21 nt, Artificial Sequence
  Synthetic oligonucleotide
  hsa-miR-379-5p MIMAT0000733
ugguagacuauggaacguagg

SEQ ID NO: 453 - RNA, 22 nt, Artificial Sequence
  Synthetic oligonucleotide
  hsa-miR-4678 MIMAT0019762
aagguauuguucagacuuauga

SEQ ID NO: 454 - RNA, 22 nt, Artificial Sequence
  Synthetic oligonucleotide
  hsa-miR-3126-5p MIMAT0014989
ugagggacagaugccagaagca

SEQ ID NO: 455 - RNA, 21 nt, Artificial Sequence
  Synthetic oligonucleotide
  hsa-miR-6069 MIMAT0023694
gggcuagggccugcugccccc

SEQ ID NO: 456 - RNA, 22 nt, Artificial Sequence
  Synthetic oligonucleotide
  hsa-miR-1255b-5p MIMAT0005945
cggaugagcaaagaaagugguu

SEQ ID NO: 457 - RNA, 21 nt, Artificial Sequence
  Synthetic oligonucleotide
  hsa-miR-6715a-3p MIMAT0025841
ccaaaccagucgugccugugg

SEQ ID NO: 458 - RNA, 17 nt, Artificial Sequence
  Synthetic oligonucleotide
  hsa-miR-4276 MIMAT0016904
cucagugacucaugugc

SEQ ID NO: 459 - RNA, 21 nt, Artificial Sequence
  Synthetic oligonucleotide
  hsa-miR-6812-3p MIMAT0027525
ccgcucuuccccugaccccag

SEQ ID NO: 460 - RNA, 21 nt, Artificial Sequence
  Synthetic oligonucleotide
  hsa-miR-4680-3p MIMAT0019765
ucugaauuguaagaguuguua

SEQ ID NO: 461 - RNA, 22 nt, Artificial Sequence
  Synthetic oligonucleotide
  hsa-let-7g-5p MIMAT0000414
ugagguaguaguuuguacaguu

SEQ ID NO: 462 - RNA, 22 nt, Artificial Sequence
  Synthetic oligonucleotide
  hsa-miR-4757-3p MIMAT0019902
caugacgucacagaggcuucgc

SEQ ID NO: 463 - RNA, 22 nt, Artificial Sequence
  Synthetic oligonucleotide
  hsa-miR-4731-3p MIMAT0019854
cacacaaguggcccccaacacu

SEQ ID NO: 464 - RNA, 19 nt, Artificial Sequence
  Synthetic oligonucleotide
  hsa-miR-4645-5p MIMAT0019705
accaggcaagaaauauugu

SEQ ID NO: 465 - RNA, 17 nt, Artificial Sequence
  Synthetic oligonucleotide
  hsa-miR-4304 MIMAT0016854
ccggcauguccagggca

SEQ ID NO: 466 - RNA, 22 nt, Artificial Sequence
  Synthetic oligonucleotide
  hsa-miR-4511 MIMAT0019048
gaagaacuguugcauuugcccu

SEQ ID NO: 467 - RNA, 22 nt, Artificial Sequence
  Synthetic oligonucleotide
  hsa-miR-3658 MIMAT0018078
uuuaagaaaacaccauggagau

SEQ ID NO: 468 - RNA, 23 nt, Artificial Sequence
  Synthetic oligonucleotide
  hsa-miR-197-5p MIMAT0022691
cggguagagagggcagugggagg

SEQ ID NO: 469 - RNA, 22 nt, Artificial Sequence
  Synthetic oligonucleotide
  hsa-miR-34b-3p MIMAT0004676
caaucacuaacuccacugccau

SEQ ID NO: 470 - RNA, 22 nt, Artificial Sequence
  Synthetic oligonucleotide
  hsa-miR-6846-5p MIMAT0027592
ugggggcuggaugggguagagu

SEQ ID NO: 471 - RNA, 22 nt, Artificial Sequence
  Synthetic oligonucleotide
  hsa-miR-580-5p MIMAT0026617
uaaugauucaucagacucagau

SEQ ID NO: 472 - RNA, 22 nt, Artificial Sequence
  Synthetic oligonucleotide
  hsa-miR-519e-5p MIMAT0002828
uucuccaaaagggagcacuuuc

SEQ ID NO: 473 - RNA, 22 nt, Artificial Sequence
  Synthetic oligonucleotide
  hsa-miR-6715b-3p MIMAT0025843
cucaaaccggcugugccugugg

SEQ ID NO: 474 - RNA, 23 nt, Artificial Sequence
  Synthetic oligonucleotide
  hsa-miR-494-5p MIMAT0026607
agguuguccguguugucuucucu

SEQ ID NO: 475 - RNA, 23 nt, Artificial Sequence
  Synthetic oligonucleotide
  hsa-miR-106a-5p MIMAT0000103
aaaagugcuuacagugcagguag

SEQ ID NO: 476 - RNA, 22 nt, Artificial Sequence
  Synthetic oligonucleotide
  hsa-miR-4714-5p MIMAT0019822
aacucugaccccuuagguugau

SEQ ID NO: 477 - RNA, 20 nt, Artificial Sequence
  Synthetic oligonucleotide
  hsa-miR-599 MIMAT0003267
guugugucaguuuaucaaac

SEQ ID NO: 478 - RNA, 22 nt, Artificial Sequence
  Synthetic oligonucleotide
  hsa-miR-5697 MIMAT0022490
ucaaguaguuucaugauaaagg

SEQ ID NO: 479 - RNA, 24 nt, Artificial Sequence
  Synthetic oligonucleotide
  hsa-miR-216b-3p MIMAT0026721
acacacuuacccguagagauucua

SEQ ID NO: 480 - RNA, 23 nt, Artificial Sequence
  Synthetic oligonucleotide
  hsa-miR-4682 MIMAT0019767
ucugaguuccuggagccuggucu

SEQ ID NO: 481 - RNA, 24 nt, Artificial Sequence
  Synthetic oligonucleotide
  hsa-miR-3692-5p MIMAT0018121
ccugcuggucaggaguggauacug

SEQ ID NO: 482 - RNA, 18 nt, Artificial Sequence
  Synthetic oligonucleotide
  hsa-miR-4519 MIMAT0019056
cagcagugcgcagggcug

SEQ ID NO: 483 - RNA, 23 nt, Artificial Sequence
  Synthetic oligonucleotide
  hsa-miR-6801-5p MIMAT0027502
uggucagaggcagcaggaaauga

SEQ ID NO: 484 - RNA, 22 nt, Artificial Sequence
  Synthetic oligonucleotide
  hsa-miR-548v MIMAT0015020
agcuacaguuacuuuugcacca

SEQ ID NO: 485 - RNA, 22 nt, Artificial Sequence
  Synthetic oligonucleotide
  hsa-miR-3661 MIMAT0018082
ugaccugggacucggacagcug

SEQ ID NO: 486 - RNA, 18 nt, Artificial Sequence
  Synthetic oligonucleotide
  hsa-miR-4791 MIMAT0019963
uggauaugaugacugaaa

SEQ ID NO: 487 - RNA, 23 nt, Artificial Sequence
  Synthetic oligonucleotide
  hsa-miR-4638-3p MIMAT0019696
ccuggacaccgcucagccggccg

SEQ ID NO: 488 - RNA, 22 nt, Artificial Sequence
  Synthetic oligonucleotide
  hsa-miR-214-5p MIMAT0004564
ugccugucuacacuugcugugc

SEQ ID NO: 489 - RNA, 22 nt, Artificial Sequence
  Synthetic oligonucleotide
  hsa-miR-513b-3p MIMAT0026749
aaaugucaccuuuuugagagga

SEQ ID NO: 490 - RNA, 21 nt, Artificial Sequence
  Synthetic oligonucleotide
  hsa-miR-6500-3p MIMAT0025455
acacuuguugggaugaccugc

SEQ ID NO: 491 - RNA, 22 nt, Artificial Sequence
  Synthetic oligonucleotide
  hsa-miR-1296-5p MIMAT0005794
uuagggcccuggcuccaucucc

SEQ ID NO: 492 - RNA, 23 nt, Artificial Sequence
  Synthetic oligonucleotide
  hsa-miR-635 MIMAT0003305
acuugggcacugaaacaaugucc

SEQ ID NO: 493 - RNA, 21 nt, Artificial Sequence
  Synthetic oligonucleotide
  hsa-miR-6892-5p MIMAT0027684
guaagggaccggagaguagga

SEQ ID NO: 494 - RNA, 22 nt, Artificial Sequence
  Synthetic oligonucleotide
  hsa-miR-328-3p MIMAT0000752
cuggcccucucugcccuuccgu

SEQ ID NO: 495 - RNA, 23 nt, Artificial Sequence
  Synthetic oligonucleotide
  hsa-miR-372-5p MIMAT0026484
ccucaaauguggagcacuauucu

SEQ ID NO: 496 - RNA, 24 nt, Artificial Sequence
  Synthetic oligonucleotide
  hsa-miR-1291 MIMAT0005881
uggcccugacugaagaccagcagu

SEQ ID NO: 497 - RNA, 21 nt, Artificial Sequence
  Synthetic oligonucleotide
  hsa-miR-3912-3p MIMAT0018186
uaacgcauaauauggacaugu

SEQ ID NO: 498 - RNA, 21 nt, Artificial Sequence
  Synthetic oligonucleotide
  hsa-miR-190b MIMAT0004929
ugauauguuugauauuggguu

SEQ ID NO: 499 - RNA, 22 nt, Artificial Sequence
  Synthetic oligonucleotide
  hsa-miR-4673 MIMAT0019755
uccaggcaggagccggacugga

SEQ ID NO: 500 - RNA, 22 nt, Artificial Sequence
  Synthetic oligonucleotide
  hsa-miR-885-3p MIMAT0004948
aggcagcgggguguaguggaua

SEQ ID NO: 501 - RNA, 21 nt, Artificial Sequence
  Synthetic oligonucleotide
  hsa-miR-6075 MIMAT0023700
acggcccaggcggcauuggug

SEQ ID NO: 502 - RNA, 22 nt, Artificial Sequence
  Synthetic oligonucleotide
  hsa-miR-495-5p MIMAT0022924
gaaguugcccauguuauuuucg

SEQ ID NO: 503 - RNA, 21 nt, Artificial Sequence
  Synthetic oligonucleotide
  hsa-miR-4759 MIMAT0019905
uaggacuagauguuggaauua

SEQ ID NO: 504 - RNA, 22 nt, Artificial Sequence
  Synthetic oligonucleotide
  hsa-miR-141-5p MIMAT0004598
caucuuccaguacaguguugga

SEQ ID NO: 505 - DNA, 20 bp, Artificial Sequence
  Synthetic oligonucleotide
  hsa-miR-4484 MIMAT0019018
aaaaggcgggagaagcccca

SEQ ID NO: 506 - RNA, 22 nt, Artificial Sequence
  Synthetic oligonucleotide
  hsa-miR-643 MIMAT0003313
acuuguaugcuagcucagguag

SEQ ID NO: 507 - RNA, 22 nt, Artificial Sequence
  Synthetic oligonucleotide
  hsa-miR-4676-3p MIMAT0019759
cacuguuucaccacuggcucuu

SEQ ID NO: 508 - RNA, 22 nt, Artificial Sequence
  Synthetic oligonucleotide
  hsa-miR-3169 MIMAT0015044
uaggacugugcuuggcacauag

SEQ ID NO: 509 - RNA, 22 nt, Artificial Sequence
  Synthetic oligonucleotide
  hsa-miR-4735-5p MIMAT0019860
ccuaauuugaacaccuucggua

SEQ ID NO: 510 - RNA, 22 nt, Artificial Sequence
  Synthetic oligonucleotide
  hsa-miR-4756-3p MIMAT0019900
ccagagaugguugccuuccuau

SEQ ID NO: 511 - RNA, 21 nt, Artificial Sequence
  Synthetic oligonucleotide
  hsa-miR-1908-5p MIMAT0007881
cggcggggacggcgauugguc

SEQ ID NO: 512 - RNA, 21 nt, Artificial Sequence
  Synthetic oligonucleotide
  hsa-miR-2277-3p MIMAT0011777
ugacagcgcccugccuggcuc

SEQ ID NO: 513 - RNA, 23 nt, Artificial Sequence
  Synthetic oligonucleotide
  hsa-miR-3162-5p MIMAT0015036
uuagggaguagaaggguggggag

SEQ ID NO: 514 - RNA, 21 nt, Artificial Sequence
  Synthetic oligonucleotide
  hsa-miR-551b-3p MIMAT0003233
gcgacccauacuugguuucag

SEQ ID NO: 515 - RNA, 20 nt, Artificial Sequence
  Synthetic oligonucleotide
  hsa-miR-5739 MIMAT0023116
gcggagagagaauggggagc

SEQ ID NO: 516 - RNA, 21 nt, Artificial Sequence
  Synthetic oligonucleotide
  hsa-miR-6893-5p MIMAT0027686
caggcagguguaggguggagc

SEQ ID NO: 517 - RNA, 21 nt, Artificial Sequence
  Synthetic oligonucleotide
  hsa-miR-548ae-3p MIMAT0018954
caaaaacugcaauuacuuuca

SEQ ID NO: 518 - RNA, 21 nt, Artificial Sequence
  Synthetic oligonucleotide
  hsa-miR-6821-3p MIMAT0027543
ugaccucuccgcuccgcacag

SEQ ID NO: 519 - RNA, 21 nt, Artificial Sequence
  Synthetic oligonucleotide
  hsa-miR-378i MIMAT0019074
acuggacuaggagucagaagg

SEQ ID NO: 520 - RNA, 22 nt, Artificial Sequence
  Synthetic oligonucleotide
  hsa-miR-4539 MIMAT0019082
gcugaacugggcugagcugggc

SEQ ID NO: 521 - RNA, 23 nt, Artificial Sequence
  Synthetic oligonucleotide
  hsa-miR-323b-5p MIMAT0001630
agguuguccguggugaguucgca

SEQ ID NO: 522 - RNA, 20 nt, Artificial Sequence
  Synthetic oligonucleotide
  hsa-miR-518a-5p MIMAT0005457
cugcaaagggaagcccuuuc

SEQ ID NO: 523 - RNA, 25 nt, Artificial Sequence
  Synthetic oligonucleotide
  hsa-miR-608 MIMAT0003276
aggggugguguugggacagcuccgu

SEQ ID NO: 524 - RNA, 23 nt, Artificial Sequence
  Synthetic oligonucleotide
  hsa-miR-6514-5p MIMAT0025484
uauggaguggacuuucagcuggc

SEQ ID NO: 525 - RNA, 21 nt, Artificial Sequence
  Synthetic oligonucleotide
  hsa-miR-3615 MIMAT0017994
ucucucggcuccucgcggcuc

SEQ ID NO: 526 - RNA, 23 nt, Artificial Sequence
  Synthetic oligonucleotide
  hsa-miR-770-5p MIMAT0003948
uccaguaccacgugucagggcca

SEQ ID NO: 527 - RNA, 20 nt, Artificial Sequence
  Synthetic oligonucleotide
  hsa-miR-3621 MIMAT0018002
cgcgggucggggucugcagg

SEQ ID NO: 528 - RNA, 17 nt, Artificial Sequence
  Synthetic oligonucleotide
  hsa-miR-4508 MIMAT0019045
gcggggcugggcgcgcg

SEQ ID NO: 529 - RNA, 22 nt, Artificial Sequence
  Synthetic oligonucleotide
  hsa-miR-6839-3p MIMAT0027581
uuggguuuucucuucaauccag

SEQ ID NO: 530 - RNA, 23 nt, Artificial Sequence
  Synthetic oligonucleotide
  hsa-miR-4698 MIMAT0019793
ucaaaauguagaggaagacccca

SEQ ID NO: 531 - RNA, 22 nt, Artificial Sequence
  Synthetic oligonucleotide
  hsa-miR-4521 MIMAT0019058
gcuaaggaaguccugugcucag

SEQ ID NO: 532 - RNA, 21 nt, Artificial Sequence
  Synthetic oligonucleotide
  hsa-miR-33a-5p MIMAT0000091
gugcauuguaguugcauugca

SEQ ID NO: 533 - RNA, 22 nt, Artificial Sequence
  Synthetic oligonucleotide
  hsa-miR-1287-5p MIMAT0005878
ugcuggaucagugguucgaguc

SEQ ID NO: 534 - RNA, 19 nt, Artificial Sequence
  Synthetic oligonucleotide
  hsa-miR-4650-5p MIMAT0019713
ucaggccucuuucuaccuu

SEQ ID NO: 535 - RNA, 22 nt, Artificial Sequence
  Synthetic oligonucleotide
  hsa-miR-154-5p MIMAT0000452
uagguuauccguguugccuucg

SEQ ID NO: 536 - RNA, 21 nt, Artificial Sequence
  Synthetic oligonucleotide
  hsa-miR-6857-3p MIMAT0027615
ugacugagcuucuccccacag

SEQ ID NO: 537 - RNA, 22 nt, Artificial Sequence
  Synthetic oligonucleotide
  hsa-miR-449b-3p MIMAT0009203
cagccacaacuacccugccacu

SEQ ID NO: 538 - RNA, 23 nt, Artificial Sequence
  Synthetic oligonucleotide
  hsa-miR-3617-3p MIMAT0022966
caucagcacccuauguccuuucu

SEQ ID NO: 539 - RNA, 18 nt, Artificial Sequence
  Synthetic oligonucleotide
  hsa-miR-4253 MIMAT0016882
agggcauguccagggggu

SEQ ID NO: 540 - RNA, 22 nt, Artificial Sequence
  Synthetic oligonucleotide
  hsa-miR-216b-5p MIMAT0004959
aaaucucugcaggcaaauguga

SEQ ID NO: 541 - RNA, 19 nt, Artificial Sequence
  Synthetic oligonucleotide
  hsa-miR-6817-3p MIMAT0027535
ucucucugacuccauggca

SEQ ID NO: 542 - RNA, 22 nt, Artificial Sequence
  Synthetic oligonucleotide
  hsa-miR-1226-3p MIMAT0005577
ucaccagcccuguguucccuag

SEQ ID NO: 543 - RNA, 22 nt, Artificial Sequence
  Synthetic oligonucleotide
  hsa-miR-127-3p MIMAT0000446
ucggauccgucugagcuuggcu

SEQ ID NO: 544 - RNA, 22 nt, Artificial Sequence
  Synthetic oligonucleotide
  hsa-miR-5004-3p MIMAT0021028
cuuggauuuuccugggccucag

SEQ ID NO: 545 - RNA, 22 nt, Artificial Sequence
  Synthetic oligonucleotide
  hsa-miR-2681-5p MIMAT0013515
guuuuaccaccuccaggagacu

SEQ ID NO: 546 - RNA, 21 nt, Artificial Sequence
  Synthetic oligonucleotide
  hsa-miR-23b-3p MIMAT0000418
aucacauugccagggauuacc

SEQ ID NO: 547 - RNA, 22 nt, Artificial Sequence
  Synthetic oligonucleotide
  hsa-miR-3613-5p MIMAT0017990
uguuguacuuuuuuuuuuguuc

SEQ ID NO: 548 - RNA, 21 nt, Artificial Sequence
  Synthetic oligonucleotide
  hsa-miR-5096 MIMAT0020603
guuucaccauguuggucaggc

SEQ ID NO: 549 - RNA, 23 nt, Artificial Sequence
  Synthetic oligonucleotide
  hsa-miR-3614-5p MIMAT0017992
ccacuuggaucugaaggcugccc

SEQ ID NO: 550 - RNA, 21 nt, Artificial Sequence
  Synthetic oligonucleotide
  hsa-miR-6779-3p MIMAT0027459
aagcccugucuccucccaucu

SEQ ID NO: 551 - RNA, 21 nt, Artificial Sequence
  Synthetic oligonucleotide
  hsa-miR-718 MIMAT0012735
cuuccgccccgccgggcgucg

SEQ ID NO: 552 - RNA, 21 nt, Artificial Sequence
  Synthetic oligonucleotide
  hsa-miR-4718 MIMAT0019831
agcuguaccugaaaccaagca

SEQ ID NO: 553 - RNA, 22 nt, Artificial Sequence
  Synthetic oligonucleotide
  hsa-miR-98-3p MIMAT0022842
cuauacaacuuacuacuuuccc

SEQ ID NO: 554 - RNA, 23 nt, Artificial Sequence
  Synthetic oligonucleotide
  hsa-miR-325 MIMAT0000771
ccuaguagguguccaguaagugu

SEQ ID NO: 555 - RNA, 21 nt, Artificial Sequence
  Synthetic oligonucleotide
  hsa-miR-6795-3p MIMAT0027491
accccucguuucuucccccag

SEQ ID NO: 556 - RNA, 22 nt, Artificial Sequence
  Synthetic oligonucleotide
  hsa-miR-5195-5p MIMAT0021126
aaccccuaaggcaacuggaugg

SEQ ID NO: 557 - RNA, 22 nt, Artificial Sequence
  Synthetic oligonucleotide
  hsa-miR-6501-5p MIMAT0025458
aguugccagggcugccuuuggu

SEQ ID NO: 558 - RNA, 20 nt, Artificial Sequence
  Synthetic oligonucleotide
  hsa-miR-4520-5p MIMAT0019235
ccugcguguuuucuguccaa

SEQ ID NO: 559 - RNA, 21 nt, Artificial Sequence
  Synthetic oligonucleotide
  hsa-miR-4774-3p MIMAT0019930
auugccuaacaugugccagaa

SEQ ID NO: 560 - RNA, 18 nt, Artificial Sequence
  Synthetic oligonucleotide
  hsa-miR-4323 MIMAT0016875
cagccccacagccucaga

SEQ ID NO: 561 - RNA, 22 nt, Artificial Sequence
  Synthetic oligonucleotide
  hsa-miR-4750-3p MIMAT0022979
ccugacccacccccucccgcag

SEQ ID NO: 562 - RNA, 23 nt, Artificial Sequence
  Synthetic oligonucleotide
  hsa-miR-4665-5p MIMAT0019739
cugggggacgcgugagcgcgagc

SEQ ID NO: 563 - RNA, 23 nt, Artificial Sequence
  Synthetic oligonucleotide
  hsa-miR-302a-3p MIMAT0000684
uaagugcuuccauguuuugguga

SEQ ID NO: 564 - RNA, 21 nt, Artificial Sequence
  Synthetic oligonucleotide
  hsa-miR-6790-3p MIMAT0027481
cgaccucggcgaccccucacu

SEQ ID NO: 565 - RNA, 22 nt, Artificial Sequence
  Synthetic oligonucleotide
  hsa-miR-148b-5p MIMAT0004699
aaguucuguuauacacucaggc

SEQ ID NO: 566 - RNA, 22 nt, Artificial Sequence
  Synthetic oligonucleotide
  hsa-miR-3129-5p MIMAT0014992
gcaguaguguagagauugguuu

SEQ ID NO: 567 - RNA, 18 nt, Artificial Sequence
  Synthetic oligonucleotide
  hsa-miR-4299 MIMAT0016851
gcuggugacaugagaggc

SEQ ID NO: 568 - RNA, 22 nt, Artificial Sequence
  Synthetic oligonucleotide
  hsa-miR-3972 MIMAT0019357
cugccagccccguuccagggca

SEQ ID NO: 569 - RNA, 23 nt, Artificial Sequence
  Synthetic oligonucleotide
  hsa-miR-5197-5p MIMAT0021130
caauggcacaaacucauucuuga

SEQ ID NO: 570 - RNA, 22 nt, Artificial Sequence
  Synthetic oligonucleotide
  hsa-miR-1343-5p MIMAT0027038
uggggagcggcccccggguggg

SEQ ID NO: 571 - DNA, 20 bp, Artificial Sequence
  Synthetic oligonucleotide
  hsa-miR-3960 MIMAT0019337
ggcggcggcggaggcggggg

SEQ ID NO: 572 - RNA, 17 nt, Artificial Sequence
  Synthetic oligonucleotide
  hsa-miR-4303 MIMAT0016856
uucugagcugaggacag

SEQ ID NO: 573 - RNA, 24 nt, Artificial Sequence
  Synthetic oligonucleotide
  hsa-miR-3132 MIMAT0014997
uggguagagaaggagcucagagga

SEQ ID NO: 574 - RNA, 21 nt, Artificial Sequence
  Synthetic oligonucleotide
  hsa-miR-31-5p MIMAT0000089
aggcaagaugcuggcauagcu

SEQ ID NO: 575 - RNA, 22 nt, Artificial Sequence
  Synthetic oligonucleotide
  hsa-miR-541-3p MIMAT0004920
uggugggcacagaaucuggacu

SEQ ID NO: 576 - RNA, 21 nt, Artificial Sequence
  Synthetic oligonucleotide
  hsa-miR-518f-3p MIMAT0002842
gaaagcgcuucucuuuagagg

SEQ ID NO: 577 - RNA, 22 nt, Artificial Sequence
  Synthetic oligonucleotide
  hsa-miR-6825-3p MIMAT0027551
gcgcugacccgccuucuccgca

SEQ ID NO: 578 - RNA, 21 nt, Artificial Sequence
  Synthetic oligonucleotide
  hsa-miR-126-5p MIMAT0000444
cauuauuacuuuugguacgcg

SEQ ID NO: 579 - RNA, 21 nt, Artificial Sequence
  Synthetic oligonucleotide
  hsa-miR-6770-3p MIMAT0027441
cuggcggcugugucuucacag

SEQ ID NO: 580 - RNA, 22 nt, Artificial Sequence
  Synthetic oligonucleotide
  hsa-miR-4420 MIMAT0018933
gucacugaugucuguagcugag

SEQ ID NO: 581 - RNA, 21 nt, Artificial Sequence
  Synthetic oligonucleotide
  hsa-miR-1258 MIMAT0005909
aguuaggauuaggucguggaa

SEQ ID NO: 582 - RNA, 21 nt, Artificial Sequence
  Synthetic oligonucleotide
  hsa-miR-488-5p MIMAT0002804
cccagauaauggcacucucaa

SEQ ID NO: 583 - RNA, 24 nt, Artificial Sequence
  Synthetic oligonucleotide
  hsa-miR-3138 MIMAT0015006
uguggacagugagguagagggagu

SEQ ID NO: 584 - RNA, 22 nt, Artificial Sequence
  Synthetic oligonucleotide
  hsa-miR-4662b MIMAT0019736
aaagauggacaauuggcuaaau

SEQ ID NO: 585 - RNA, 22 nt, Artificial Sequence
  Synthetic oligonucleotide
  hsa-miR-6881-3p MIMAT0027663
auccucuuucguccuucccacu

SEQ ID NO: 586 - RNA, 22 nt, Artificial Sequence
  Synthetic oligonucleotide
  hsa-miR-3142 MIMAT0015011
aaggccuuucugaaccuucaga

SEQ ID NO: 587 - RNA, 21 nt, Artificial Sequence
  Synthetic oligonucleotide
  hsa-miR-6775-3p MIMAT0027451
aggcccuguccucugccccag

SEQ ID NO: 588 - RNA, 24 nt, Artificial Sequence
  Synthetic oligonucleotide
  hsa-miR-6864-5p MIMAT0027628
uugaagggacaagucagauaugcc

SEQ ID NO: 589 - RNA, 23 nt, Artificial Sequence
  Synthetic oligonucleotide
  hsa-miR-6721-5p MIMAT0025852
ugggcaggggcuuauuguaggag

SEQ ID NO: 590 - RNA, 23 nt, Artificial Sequence
  Synthetic oligonucleotide
  hsa-miR-6782-3p MIMAT0027465
caccuuuguguccccauccugca

SEQ ID NO: 591 - RNA, 20 nt, Artificial Sequence
  Synthetic oligonucleotide
  hsa-miR-7106-5p MIMAT0028109
ugggaggaggggaucuuggg

SEQ ID NO: 592 - RNA, 23 nt, Artificial Sequence
  Synthetic oligonucleotide
  hsa-miR-139-3p MIMAT0004552
uggagacgcggcccuguuggagu

SEQ ID NO: 593 - RNA, 21 nt, Artificial Sequence
  Synthetic oligonucleotide
  hsa-miR-554 MIMAT0003217
gcuaguccugacucagccagu

SEQ ID NO: 594 - RNA, 22 nt, Artificial Sequence
  Synthetic oligonucleotide
  hsa-miR-491-3p MIMAT0004765
cuuaugcaagauucccuucuac

SEQ ID NO: 595 - RNA, 22 nt, Artificial Sequence
  Synthetic oligonucleotide
  hsa-miR-4778-3p MIMAT0019937
ucuucuuccuuugcagaguuga

SEQ ID NO: 596 - RNA, 22 nt, Artificial Sequence
  Synthetic oligonucleotide
  hsa-miR-4659a-5p MIMAT0019726
cugccaugucuaagaagaaaac

SEQ ID NO: 597 - RNA, 24 nt, Artificial Sequence
  Synthetic oligonucleotide
  hsa-miR-6882-3p MIMAT0027665
ugcugccucuccucuugccugcag

SEQ ID NO: 598 - DNA, 16 bp, Artificial Sequence
  Synthetic oligonucleotide
  hsa-miR-4261 MIMAT0016890
aggaaacagggaccca

SEQ ID NO: 599 - RNA, 22 nt, Artificial Sequence
  Synthetic oligonucleotide
  hsa-miR-6754-5p MIMAT0027408
ccagggaggcugguuuggagga

SEQ ID NO: 600 - RNA, 21 nt, Artificial Sequence
  Synthetic oligonucleotide
  hsa-miR-376c-3p MIMAT0000720
aacauagaggaaauuccacgu

SEQ ID NO: 601 - RNA, 22 nt, Artificial Sequence
  Synthetic oligonucleotide
  hsa-miR-6826-3p MIMAT0027553
cuccccucucuuuccuguucag

SEQ ID NO: 602 - RNA, 21 nt, Artificial Sequence
  Synthetic oligonucleotide
  hsa-miR-6867-3p MIMAT0027635
cucucccucuuuacccacuag

SEQ ID NO: 603 - RNA, 22 nt, Artificial Sequence
  Synthetic oligonucleotide
  hsa-miR-30b-5p MIMAT0000420
uguaaacauccuacacucagcu

SEQ ID NO: 604 - RNA, 22 nt, Artificial Sequence
  Synthetic oligonucleotide
  hsa-miR-5687 MIMAT0022478
uuagaacguuuuagggucaaau

SEQ ID NO: 605 - RNA, 22 nt, Artificial Sequence
  Synthetic oligonucleotide
  hsa-miR-9-3p MIMAT0000442
auaaagcuagauaaccgaaagu

SEQ ID NO: 606 - RNA, 22 nt, Artificial Sequence
  Synthetic oligonucleotide
  hsa-miR-6858-3p MIMAT0027617
cagccagccccugcucaccccu

SEQ ID NO: 607 - RNA, 22 nt, Artificial Sequence
  Synthetic oligonucleotide
  hsa-miR-4697-5p MIMAT0019791
agggggcgcagucacugacgug

SEQ ID NO: 608 - RNA, 22 nt, Artificial Sequence
  Synthetic oligonucleotide
  hsa-miR-2681-3p MIMAT0013516
uaucauggaguugguaaagcac

SEQ ID NO: 609 - RNA, 21 nt, Artificial Sequence
  Synthetic oligonucleotide
  hsa-miR-3684 MIMAT0018112
uuagaccuaguacacguccuu

SEQ ID NO: 610 - RNA, 22 nt, Artificial Sequence
  Synthetic oligonucleotide
  hsa-miR-634 MIMAT0003304
aaccagcaccccaacuuuggac

SEQ ID NO: 611 - RNA, 22 nt, Artificial Sequence
  Synthetic oligonucleotide
  hsa-miR-208a-5p MIMAT0026474
gagcuuuuggcccggguuauac

SEQ ID NO: 612 - RNA, 23 nt, Artificial Sequence
  Synthetic oligonucleotide
  hsa-miR-567 MIMAT0003231
aguauguucuuccaggacagaac

SEQ ID NO: 613 - RNA, 23 nt, Artificial Sequence
  Synthetic oligonucleotide
  hsa-miR-3191-3p MIMAT0015075
uggggacguagcuggccagacag

SEQ ID NO: 614 - RNA, 21 nt, Artificial Sequence
  Synthetic oligonucleotide
  hsa-miR-4524b-5p MIMAT0022255
auagcagcauaagccugucuc

SEQ ID NO: 615 - RNA, 21 nt, Artificial Sequence
  Synthetic oligonucleotide
  hsa-miR-6726-5p MIMAT0027353
cgggagcuggggucugcaggu

SEQ ID NO: 616 - RNA, 22 nt, Artificial Sequence
  Synthetic oligonucleotide
  hsa-miR-6797-3p MIMAT0027495
ugcaugacccuucccuccccac

SEQ ID NO: 617 - RNA, 20 nt, Artificial Sequence
  Synthetic oligonucleotide
  hsa-miR-2052 MIMAT0009977
uguuuugauaacaguaaugu

SEQ ID NO: 618 - RNA, 22 nt, Artificial Sequence
  Synthetic oligonucleotide
  hsa-miR-1914-5p MIMAT0007889
cccugugcccggcccacuucug

SEQ ID NO: 619 - RNA, 22 nt, Artificial Sequence
  Synthetic oligonucleotide
  hsa-miR-330-5p MIMAT0004693
ucucugggccugugucuuaggc

SEQ ID NO: 620 - RNA, 23 nt, Artificial Sequence
  Synthetic oligonucleotide
  hsa-miR-3197 MIMAT0015082
ggaggcgcaggcucggaaaggcg

SEQ ID NO: 621 - RNA, 23 nt, Artificial Sequence
  Synthetic oligonucleotide
  hsa-miR-139-5p MIMAT0000250
ucuacagugcacgugucuccagu

SEQ ID NO: 622 - RNA, 21 nt, Artificial Sequence
  Synthetic oligonucleotide
  hsa-miR-6761-5p MIMAT0027422
ucugagagagcucgauggcag

SEQ ID NO: 623 - RNA, 23 nt, Artificial Sequence
  Synthetic oligonucleotide
  hsa-miR-941 MIMAT0004984
cacccggcugugugcacaugugc

SEQ ID NO: 624 - RNA, 21 nt, Artificial Sequence
  Synthetic oligonucleotide
  hsa-miR-4795-5p MIMAT0019968
agaaguggcuaauaauauuga

SEQ ID NO: 625 - RNA, 21 nt, Artificial Sequence
  Synthetic oligonucleotide
  hsa-miR-181b-3p MIMAT0022692
cucacugaacaaugaaugcaa

SEQ ID NO: 626 - RNA, 22 nt, Artificial Sequence
  Synthetic oligonucleotide
  hsa-miR-301a-5p MIMAT0022696
gcucugacuuuauugcacuacu

SEQ ID NO: 627 - RNA, 21 nt, Artificial Sequence
  Synthetic oligonucleotide
  hsa-miR-5047 MIMAT0020541
uugcagcugcgguuguaaggu

SEQ ID NO: 628 - RNA, 19 nt, Artificial Sequence
  Synthetic oligonucleotide
  hsa-miR-548ap-3p MIMAT0021038
aaaaaccacaauuacuuuu

SEQ ID NO: 629 - RNA, 21 nt, Artificial Sequence
  Synthetic oligonucleotide
  hsa-miR-571 MIMAT0003236
ugaguuggccaucugagugag

SEQ ID NO: 630 - RNA, 23 nt, Artificial Sequence
  Synthetic oligonucleotide
  hsa-miR-492 MIMAT0002812
aggaccugcgggacaagauucuu

SEQ ID NO: 631 - RNA, 22 nt, Artificial Sequence
  Synthetic oligonucleotide
  hsa-miR-6855-3p MIMAT0027611
agacugaccuucaaccccacag

SEQ ID NO: 632 - RNA, 22 nt, Artificial Sequence
  Synthetic oligonucleotide
  hsa-miR-340-3p MIMAT0000750
uccgucucaguuacuuuauagc

SEQ ID NO: 633 - RNA, 22 nt, Artificial Sequence
  Synthetic oligonucleotide
  hsa-miR-3160-3p MIMAT0015034
agagcugagacuagaaagccca

SEQ ID NO: 634 - RNA, 23 nt, Artificial Sequence
  Synthetic oligonucleotide
  hsa-miR-4742-5p MIMAT0019872
ucaggcaaagggauauuuacaga

SEQ ID NO: 635 - RNA, 22 nt, Artificial Sequence
  Synthetic oligonucleotide
  hsa-miR-4446-5p MIMAT0019233
auuucccugccauucccuuggc

SEQ ID NO: 636 - RNA, 22 nt, Artificial Sequence
  Synthetic oligonucleotide
  hsa-miR-126-3p MIMAT0000445
ucguaccgugaguaauaaugcg

SEQ ID NO: 637 - RNA, 22 nt, Artificial Sequence
  Synthetic oligonucleotide
  hsa-miR-451a MIMAT0001631
aaaccguuaccauuacugaguu

SEQ ID NO: 638 - RNA, 21 nt, Artificial Sequence
  Synthetic oligonucleotide
  hsa-miR-548ag MIMAT0018969
aaagguaauugugguuucugc

SEQ ID NO: 639 - RNA, 22 nt, Artificial Sequence
  Synthetic oligonucleotide
  hsa-miR-3194-3p MIMAT0019218
agcucugcugcucacuggcagu

SEQ ID NO: 640 - RNA, 24 nt, Artificial Sequence
  Synthetic oligonucleotide
  hsa-miR-8076 MIMAT0031003
uauauggacuuuucugauacaaug

SEQ ID NO: 641 - RNA, 23 nt, Artificial Sequence
  Synthetic oligonucleotide
  hsa-miR-7151-5p MIMAT0028212
gauccaucucugccuguauuggc

SEQ ID NO: 642 - RNA, 22 nt, Artificial Sequence
  Synthetic oligonucleotide
  hsa-miR-4709-5p MIMAT0019811
acaacagugacuugcucuccaa

SEQ ID NO: 643 - RNA, 24 nt, Artificial Sequence
  Synthetic oligonucleotide
  hsa-miR-2277-5p MIMAT0017352
agcgcgggcugagcgcugccaguc

SEQ ID NO: 644 - RNA, 22 nt, Artificial Sequence
  Synthetic oligonucleotide
  hsa-miR-526a MIMAT0002845
cucuagagggaagcacuuucug

SEQ ID NO: 645 - RNA, 20 nt, Artificial Sequence
  Synthetic oligonucleotide
  hsa-miR-6784-5p MIMAT0027468
gccggggcuuugggugaggg

SEQ ID NO: 646 - RNA, 22 nt, Artificial Sequence
  Synthetic oligonucleotide
  hsa-miR-4476 MIMAT0019003
caggaaggauuuagggacaggc

SEQ ID NO: 647 - RNA, 20 nt, Artificial Sequence
  Synthetic oligonucleotide
  hsa-miR-3125 MIMAT0014988
uagaggaagcuguggagaga

SEQ ID NO: 648 - RNA, 22 nt, Artificial Sequence
  Synthetic oligonucleotide
  hsa-miR-4498 MIMAT0019033
ugggcuggcagggcaagugcug

SEQ ID NO: 649 - RNA, 23 nt, Artificial Sequence
  Synthetic oligonucleotide
  hsa-miR-103a-3p MIMAT0000101
agcagcauuguacagggcuauga

SEQ ID NO: 650 - RNA, 18 nt, Artificial Sequence
  Synthetic oligonucleotide
  hsa-miR-4472 MIMAT0018999
ggugggggguguuguuuu

SEQ ID NO: 651 - RNA, 22 nt, Artificial Sequence
  Synthetic oligonucleotide
  hsa-let-7i-3p MIMAT0004585
cugcgcaagcuacugccuugcu

SEQ ID NO: 652 - RNA, 22 nt, Artificial Sequence
  Synthetic oligonucleotide
  hsa-miR-5702 MIMAT0022495
ugagucagcaacauaucccaug

SEQ ID NO: 653 - RNA, 23 nt, Artificial Sequence
  Synthetic oligonucleotide
  hsa-miR-199b-5p MIMAT0000263
cccaguguuuagacuaucuguuc

SEQ ID NO: 654 - RNA, 19 nt, Artificial Sequence
  Synthetic oligonucleotide
  hsa-miR-383-3p MIMAT0026485
acagcacugccuggucaga

SEQ ID NO: 655 - RNA, 22 nt, Artificial Sequence
  Synthetic oligonucleotide
  hsa-miR-4696 MIMAT0019790
ugcaagacggauacugucaucu

SEQ ID NO: 656 - RNA, 21 nt, Artificial Sequence
  Synthetic oligonucleotide
  hsa-miR-8062 MIMAT0030989
cagugauuugaggauuauugc

SEQ ID NO: 657 - RNA, 21 nt, Artificial Sequence
  Synthetic oligonucleotide
  hsa-miR-518e-3p MIMAT0002861
aaagcgcuucccuucagagug

SEQ ID NO: 658 - RNA, 21 nt, Artificial Sequence
  Synthetic oligonucleotide
  hsa-miR-7114-5p MIMAT0028125
ucuguggaguggggugccugu

SEQ ID NO: 659 - RNA, 23 nt, Artificial Sequence
  Synthetic oligonucleotide
  hsa-miR-6821-5p MIMAT0027542
gugcgugguggcucgaggcgggg

SEQ ID NO: 660 - RNA, 21 nt, Artificial Sequence
  Synthetic oligonucleotide
  hsa-miR-6879-3p MIMAT0027659
ugucacccgcuccuugcccag

SEQ ID NO: 661 - RNA, 22 nt, Artificial Sequence
  Synthetic oligonucleotide
  hsa-miR-5580-5p MIMAT0022273
ugcuggcucauuucauaugugu

SEQ ID NO: 662 - RNA, 20 nt, Artificial Sequence
  Synthetic oligonucleotide
  hsa-miR-8079 MIMAT0031006
cagugaucgucucugcuggc

SEQ ID NO: 663 - RNA, 20 nt, Artificial Sequence
  Synthetic oligonucleotide
  hsa-miR-527 MIMAT0002862
cugcaaagggaagcccuuuc

SEQ ID NO: 664 - RNA, 22 nt, Artificial Sequence
  Synthetic oligonucleotide
  hsa-miR-450a-1-3p MIMAT0022700
auugggaacauuuugcauguau

SEQ ID NO: 665 - RNA, 17 nt, Artificial Sequence
  Synthetic oligonucleotide
  hsa-miR-4499 MIMAT0019035
aagacugagaggaggga

SEQ ID NO: 666 - RNA, 21 nt, Artificial Sequence
  Synthetic oligonucleotide
  hsa-miR-4781-5p MIMAT0019942
uagcggggauuccaauauugg

SEQ ID NO: 667 - RNA, 18 nt, Artificial Sequence
  Synthetic oligonucleotide
  hsa-miR-1321 MIMAT0005952
cagggaggugaaugugau

SEQ ID NO: 668 - RNA, 19 nt, Artificial Sequence
  Synthetic oligonucleotide
  hsa-miR-585-3p MIMAT0003250
ugggcguaucuguaugcua

SEQ ID NO: 669 - RNA, 18 nt, Artificial Sequence
  Synthetic oligonucleotide
  hsa-miR-4305 MIMAT0016857
ccuagacaccuccaguuc

SEQ ID NO: 670 - RNA, 22 nt, Artificial Sequence
  Synthetic oligonucleotide
  hsa-miR-2276-5p MIMAT0026921
gcccucugucaccuugcagacg

SEQ ID NO: 671 - RNA, 22 nt, Artificial Sequence
  Synthetic oligonucleotide
  hsa-miR-329-3p MIMAT0001629
aacacaccugguuaaccucuuu

SEQ ID NO: 672 - RNA, 22 nt, Artificial Sequence
  Synthetic oligonucleotide
  hsa-miR-1915-5p MIMAT0007891
accuugccuugcugcccgggcc

SEQ ID NO: 673 - RNA, 21 nt, Artificial Sequence
  Synthetic oligonucleotide
  hsa-miR-224-5p MIMAT0000281
caagucacuagugguuccguu

SEQ ID NO: 674 - RNA, 22 nt, Artificial Sequence
  Synthetic oligonucleotide
  hsa-miR-6840-3p MIMAT0027583
gcccaggacuuugugcggggug

SEQ ID NO: 675 - RNA, 22 nt, Artificial Sequence
  Synthetic oligonucleotide
  hsa-miR-6072 MIMAT0023697
uccucaucacacugcaccuuag

SEQ ID NO: 676 - RNA, 24 nt, Artificial Sequence
  Synthetic oligonucleotide
  hsa-miR-6079 MIMAT0023704
uuggaagcuuggaccaacuagcug

SEQ ID NO: 677 - RNA, 24 nt, Artificial Sequence
  Synthetic oligonucleotide
  hsa-miR-6511b-5p MIMAT0025847
cugcaggcagaaguggggcugaca

SEQ ID NO: 678 - RNA, 22 nt, Artificial Sequence
  Synthetic oligonucleotide
  hsa-miR-548ax MIMAT0022474
agaaguaauugcgguuuugcca

SEQ ID NO: 679 - RNA, 20 nt, Artificial Sequence
  Synthetic oligonucleotide
  hsa-miR-144-3p MIMAT0000436
uacaguauagaugauguacu

SEQ ID NO: 680 - RNA, 22 nt, Artificial Sequence
  Synthetic oligonucleotide
  hsa-miR-4700-5p MIMAT0019796
ucuggggaugaggacagugugu

SEQ ID NO: 681 - DNA, 17 bp, Artificial Sequence
  Synthetic oligonucleotide
  hsa-miR-4442 MIMAT0018960
gccggacaagagggagg

SEQ ID NO: 682 - RNA, 23 nt, Artificial Sequence
  Synthetic oligonucleotide
  hsa-miR-3945 MIMAT0018361
agggcauaggagaggguugauau

SEQ ID NO: 683 - RNA, 22 nt, Artificial Sequence
  Synthetic oligonucleotide
  hsa-miR-4713-5p MIMAT0019820
uucucccacuaccaggcuccca

SEQ ID NO: 684 - RNA, 22 nt, Artificial Sequence
  Synthetic oligonucleotide
  hsa-miR-520h MIMAT0002867
acaaagugcuucccuuuagagu

SEQ ID NO: 685 - RNA, 23 nt, Artificial Sequence
  Synthetic oligonucleotide
  hsa-miR-3616-3p MIMAT0017996
cgagggcauuucaugaugcaggc

SEQ ID NO: 686 - RNA, 21 nt, Artificial Sequence
  Synthetic oligonucleotide
  hsa-miR-499a-5p MIMAT0002870
uuaagacuugcagugauguuu

SEQ ID NO: 687 - DNA, 17 bp, Artificial Sequence
  Synthetic oligonucleotide
  hsa-miR-4532 MIMAT0019071
ccccggggagcccggcg

SEQ ID NO: 688 - RNA, 18 nt, Artificial Sequence
  Synthetic oligonucleotide
  hsa-miR-4311 MIMAT0016863
gaaagagagcugagugug

SEQ ID NO: 689 - RNA, 18 nt, Artificial Sequence
  Synthetic oligonucleotide
  hsa-miR-4514 MIMAT0019051
acaggcaggauuggggaa

SEQ ID NO: 690 - RNA, 22 nt, Artificial Sequence
  Synthetic oligonucleotide
  hsa-miR-374a-3p MIMAT0004688
cuuaucagauuguauuguaauu

SEQ ID NO: 691 - RNA, 22 nt, Artificial Sequence
  Synthetic oligonucleotide
  hsa-miR-141-3p MIMAT0000432
uaacacugucugguaaagaugg

SEQ ID NO: 692 - RNA, 24 nt, Artificial Sequence
  Synthetic oligonucleotide
  hsa-miR-6856-5p MIMAT0027612
aagagaggagcaguggugcugugg

SEQ ID NO: 693 - RNA, 22 nt, Artificial Sequence
  Synthetic oligonucleotide
  hsa-miR-186-5p MIMAT0000456
caaagaauucuccuuuugggcu

SEQ ID NO: 694 - RNA, 23 nt, Artificial Sequence
  Synthetic oligonucleotide
  hsa-miR-339-5p MIMAT0000764
ucccuguccuccaggagcucacg

SEQ ID NO: 695 - RNA, 22 nt, Artificial Sequence
  Synthetic oligonucleotide
  hsa-miR-486-5p MIMAT0002177
uccuguacugagcugccccgag

SEQ ID NO: 696 - RNA, 21 nt, Artificial Sequence
  Synthetic oligonucleotide
  hsa-miR-3927-5p MIMAT0022970
gccuaucacauaucugccugu

SEQ ID NO: 697 - RNA, 18 nt, Artificial Sequence
  Synthetic oligonucleotide
  hsa-miR-7515 MIMAT0029310
agaagggaagauggugac

SEQ ID NO: 698 - RNA, 22 nt, Artificial Sequence
  Synthetic oligonucleotide
  hsa-miR-548j-5p MIMAT0005875
aaaaguaauugcggucuuuggu

SEQ ID NO: 699 - RNA, 21 nt, Artificial Sequence
  Synthetic oligonucleotide
  hsa-miR-548ay-5p MIMAT0025452
aaaaguaauugugguuuuugc

SEQ ID NO: 700 - RNA, 22 nt, Artificial Sequence
  Synthetic oligonucleotide
  hsa-miR-3936 MIMAT0018351
uaagggguguauggcagaugca

SEQ ID NO: 701 - RNA, 18 nt, Artificial Sequence
  Synthetic oligonucleotide
  hsa-miR-4320 MIMAT0016871
gggauucuguagcuuccu

SEQ ID NO: 702 - RNA, 22 nt, Artificial Sequence
  Synthetic oligonucleotide
  hsa-miR-4782-3p MIMAT0019945
ugauugucuucauaucuagaac

SEQ ID NO: 703 - RNA, 21 nt, Artificial Sequence
  Synthetic oligonucleotide
  hsa-miR-1273h-5p MIMAT0030415
cugggaggucaaggcugcagu

SEQ ID NO: 704 - RNA, 21 nt, Artificial Sequence
  Synthetic oligonucleotide
  hsa-miR-6823-3p MIMAT0027547
ugagccucuccuucccuccag

SEQ ID NO: 705 - RNA, 20 nt, Artificial Sequence
  Synthetic oligonucleotide
  hsa-miR-3117-5p MIMAT0019197
agacacuauacgagucauau

SEQ ID NO: 706 - RNA, 21 nt, Artificial Sequence
  Synthetic oligonucleotide
  hsa-miR-218-5p MIMAT0000275
uugugcuugaucuaaccaugu

SEQ ID NO: 707 - RNA, 22 nt, Artificial Sequence
  Synthetic oligonucleotide
  hsa-miR-663b MIMAT0005867
gguggcccggccgugccugagg

SEQ ID NO: 708 - RNA, 17 nt, Artificial Sequence
  Synthetic oligonucleotide
  hsa-miR-1279 MIMAT0005937
ucauauugcuucuuucu

SEQ ID NO: 709 - RNA, 23 nt, Artificial Sequence
  Synthetic oligonucleotide
  hsa-miR-4656 MIMAT0019723
ugggcugagggcaggaggccugu

SEQ ID NO: 710 - RNA, 23 nt, Artificial Sequence
  Synthetic oligonucleotide
  hsa-miR-135a-5p MIMAT0000428
uauggcuuuuuauuccuauguga

SEQ ID NO: 711 - RNA, 23 nt, Artificial Sequence
  Synthetic oligonucleotide
  hsa-miR-3922-5p MIMAT0019227
ucaaggccagaggucccacagca

SEQ ID NO: 712 - RNA, 22 nt, Artificial Sequence
  Synthetic oligonucleotide
  hsa-miR-3186-5p MIMAT0015067
caggcgucugucuacguggcuu

SEQ ID NO: 713 - RNA, 22 nt, Artificial Sequence
  Synthetic oligonucleotide
  hsa-miR-6785-5p MIMAT0027470
ugggagggcguggaugauggug

SEQ ID NO: 714 - RNA, 22 nt, Artificial Sequence
  Synthetic oligonucleotide
  hsa-miR-6723-5p MIMAT0025855
auaguccgaguaacgucggggc

SEQ ID NO: 715 - RNA, 23 nt, Artificial Sequence
  Synthetic oligonucleotide
  hsa-miR-2053 MIMAT0009978
guguuaauuaaaccucuauuuac

SEQ ID NO: 716 - RNA, 20 nt, Artificial Sequence
  Synthetic oligonucleotide
  hsa-miR-1587 MIMAT0019077
uugggcugggcuggguuggg

SEQ ID NO: 717 - RNA, 23 nt, Artificial Sequence
  Synthetic oligonucleotide
  hsa-miR-93-5p MIMAT0000093
caaagugcuguucgugcagguag

SEQ ID NO: 718 - RNA, 21 nt, Artificial Sequence
  Synthetic oligonucleotide
  hsa-miR-376c-5p MIMAT0022861
gguggauauuccuucuauguu

SEQ ID NO: 719 - RNA, 21 nt, Artificial Sequence
  Synthetic oligonucleotide
  hsa-miR-6816-5p MIMAT0027532
uggggcggggcaggucccugc

SEQ ID NO: 720 - RNA, 23 nt, Artificial Sequence
  Synthetic oligonucleotide
  hsa-miR-4452 MIMAT0018974
uugaauucuuggccuuaagugau

SEQ ID NO: 721 - RNA, 22 nt, Artificial Sequence
  Synthetic oligonucleotide
  hsa-miR-548k MIMAT0005882
aaaaguacuugcggauuuugcu

SEQ ID NO: 722 - RNA, 21 nt, Artificial Sequence
  Synthetic oligonucleotide
  hsa-miR-6736-5p MIMAT0027373
cugggugagggcaucuguggu

SEQ ID NO: 723 - RNA, 22 nt, Artificial Sequence
  Synthetic oligonucleotide
  hsa-miR-1236-5p MIMAT0022945
ugagugacaggggaaaugggga

SEQ ID NO: 724 - RNA, 22 nt, Artificial Sequence
  Synthetic oligonucleotide
  hsa-miR-764 MIMAT0010367
gcaggugcucacuuguccuccu

SEQ ID NO: 725 - RNA, 22 nt, Artificial Sequence
  Synthetic oligonucleotide
  hsa-miR-208b-5p MIMAT0026722
aagcuuuuugcucgaauuaugu

SEQ ID NO: 726 - RNA, 22 nt, Artificial Sequence
  Synthetic oligonucleotide
  hsa-miR-4482-5p MIMAT0019016
aacccagugggcuauggaaaug

SEQ ID NO: 727 - RNA, 22 nt, Artificial Sequence
  Synthetic oligonucleotide
  hsa-miR-6866-3p MIMAT0027633
gaucccuuuaucuguccucuag

SEQ ID NO: 728 - RNA, 22 nt, Artificial Sequence
  Synthetic oligonucleotide
  hsa-miR-518f-5p MIMAT0002841
cucuagagggaagcacuuucuc

SEQ ID NO: 729 - RNA, 19 nt, Artificial Sequence
  Synthetic oligonucleotide
  hsa-miR-4330 MIMAT0016924
ccucagaucagagccuugc

SEQ ID NO: 730 - RNA, 23 nt, Artificial Sequence
  Synthetic oligonucleotide
  hsa-miR-6511b-3p MIMAT0025848
ccucaccaccccuucugccugca

SEQ ID NO: 731 - RNA, 24 nt, Artificial Sequence
  Synthetic oligonucleotide
  hsa-miR-6750-5p MIMAT0027400
cagggaacagcugggugagcugcu

SEQ ID NO: 732 - RNA, 21 nt, Artificial Sequence
  Synthetic oligonucleotide
  hsa-miR-4501 MIMAT0019037
uaugugaccucggaugaauca

SEQ ID NO: 733 - RNA, 22 nt, Artificial Sequence
  Synthetic oligonucleotide
  hsa-miR-8067 MIMAT0030994
ccuagaaacuguaaacuuaguc

SEQ ID NO: 734 - RNA, 21 nt, Artificial Sequence
  Synthetic oligonucleotide
  hsa-miR-4803 MIMAT0019983
uaacauaauaguguggauuga

SEQ ID NO: 735 - RNA, 21 nt, Artificial Sequence
  Synthetic oligonucleotide
  hsa-miR-887-5p MIMAT0026720
cuugggagcccuguuagacuc

SEQ ID NO: 736 - RNA, 22 nt, Artificial Sequence
  Synthetic oligonucleotide
  hsa-miR-6509-3p MIMAT0025475
uuccacugccacuaccuaauuu

SEQ ID NO: 737 - RNA, 22 nt, Artificial Sequence
  Synthetic oligonucleotide
  hsa-miR-7107-5p MIMAT0028111
ucggccuggggaggaggaaggg

SEQ ID NO: 738 - RNA, 22 nt, Artificial Sequence
  Synthetic oligonucleotide
  hsa-miR-4772-3p MIMAT0019927
ccugcaacuuugccugaucaga

SEQ ID NO: 739 - RNA, 23 nt, Artificial Sequence
  Synthetic oligonucleotide
  hsa-miR-614 MIMAT0003282
gaacgccuguucuugccaggugg

SEQ ID NO: 740 - RNA, 22 nt, Artificial Sequence
  Synthetic oligonucleotide
  hsa-miR-3193 MIMAT0015077
uccugcguaggaucugaggagu

SEQ ID NO: 741 - RNA, 23 nt, Artificial Sequence
  Synthetic oligonucleotide
  hsa-miR-4783-3p MIMAT0019947
ccccgguguuggggcgcgucugc

SEQ ID NO: 742 - RNA, 19 nt, Artificial Sequence
  Synthetic oligonucleotide
  hsa-miR-1250-3p MIMAT0026740
acauuuuccagcccauuca

SEQ ID NO: 743 - RNA, 22 nt, Artificial Sequence
  Synthetic oligonucleotide
  hsa-miR-6761-3p MIMAT0027423
uccuacgcugcucucucacucc

SEQ ID NO: 744 - RNA, 23 nt, Artificial Sequence
  Synthetic oligonucleotide
  hsa-miR-6734-3p MIMAT0027370
cccuucccucacucuucucucag

SEQ ID NO: 745 - RNA, 21 nt, Artificial Sequence
  Synthetic oligonucleotide
  hsa-miR-892a MIMAT0004907
cacuguguccuuucugcguag

SEQ ID NO: 746 - RNA, 22 nt, Artificial Sequence
  Synthetic oligonucleotide
  hsa-miR-379-3p MIMAT0004690
uauguaacaugguccacuaacu

SEQ ID NO: 747 - RNA, 22 nt, Artificial Sequence
  Synthetic oligonucleotide
  hsa-miR-1304-3p MIMAT0022720
ucucacuguagccucgaacccc

SEQ ID NO: 748 - DNA, 18 bp, Artificial Sequence
  Synthetic oligonucleotide
  hsa-miR-4530 MIMAT0019069
cccagcaggacgggagcg

SEQ ID NO: 749 - RNA, 23 nt, Artificial Sequence
  Synthetic oligonucleotide
  hsa-miR-4707-5p MIMAT0019807
gccccggcgcgggcggguucugg

SEQ ID NO: 750 - RNA, 21 nt, Artificial Sequence
  Synthetic oligonucleotide
  hsa-miR-6068 MIMAT0023693
ccugcgagucuccggcggugg

SEQ ID NO: 751 - RNA, 22 nt, Artificial Sequence
  Synthetic oligonucleotide
  hsa-miR-24-1-5p MIMAT0000079
ugccuacugagcugauaucagu

SEQ ID NO: 752 - RNA, 22 nt, Artificial Sequence
  Synthetic oligonucleotide
  hsa-miR-3689e MIMAT0019009
ugugauaucaugguuccuggga

SEQ ID NO: 753 - RNA, 22 nt, Artificial Sequence
  Synthetic oligonucleotide
  hsa-miR-5584-3p MIMAT0022284
uaguucuucccuuugcccaauu

SEQ ID NO: 754 - RNA, 22 nt, Artificial Sequence
  Synthetic oligonucleotide
  hsa-miR-5010-5p MIMAT0021043
agggggauggcagagcaaaauu

SEQ ID NO: 755 - DNA, 20 bp, Artificial Sequence
  Synthetic oligonucleotide
  hsa-miR-6125 MIMAT0024598
gcggaaggcggagcggcgga

SEQ ID NO: 756 - RNA, 23 nt, Artificial Sequence
  Synthetic oligonucleotide
  hsa-miR-6835-3p MIMAT0027571
aaaagcacuuuucugucucccag

SEQ ID NO: 757 - RNA, 22 nt, Artificial Sequence
  Synthetic oligonucleotide
  hsa-miR-4424 MIMAT0018939
agaguuaacucaaaauggacua

SEQ ID NO: 758 - RNA, 23 nt, Artificial Sequence
  Synthetic oligonucleotide
  hsa-miR-7703 MIMAT0030018
uugcacucuggccuucucccagg

SEQ ID NO: 759 - RNA, 25 nt, Artificial Sequence
  Synthetic oligonucleotide
  hsa-miR-652-5p MIMAT0022709
caacccuaggagagggugccauuca

SEQ ID NO: 760 - RNA, 18 nt, Artificial Sequence
  Synthetic oligonucleotide
  hsa-miR-4272 MIMAT0016902
cauucaacuagugauugu

SEQ ID NO: 761 - RNA, 22 nt, Artificial Sequence
  Synthetic oligonucleotide
  hsa-miR-3691-3p MIMAT0019224
accaagucugcgucauccucuc

SEQ ID NO: 762 - RNA, 22 nt, Artificial Sequence
  Synthetic oligonucleotide
  hsa-miR-3183 MIMAT0015063
gccucucucggagucgcucgga

SEQ ID NO: 763 - RNA, 23 nt, Artificial Sequence
  Synthetic oligonucleotide
  hsa-miR-6863 MIMAT0027627
uagacguggugaaggauugagug

SEQ ID NO: 764 - RNA, 21 nt, Artificial Sequence
  Synthetic oligonucleotide
  hsa-miR-3942-3p MIMAT0019230
uuucagauaacaguauuacau

SEQ ID NO: 765 - RNA, 26 nt, Artificial Sequence
  Synthetic oligonucleotide
  hsa-miR-1244 MIMAT0005896
aaguaguugguuuguaugagaugguu

SEQ ID NO: 766 - RNA, 25 nt, Artificial Sequence
  Synthetic oligonucleotide
  hsa-miR-6812-5p MIMAT0027524
auggggugagauggggaggagcagc

SEQ ID NO: 767 - RNA, 22 nt, Artificial Sequence
  Synthetic oligonucleotide
  hsa-miR-556-3p MIMAT0004793
auauuaccauuagcucaucuuu

SEQ ID NO: 768 - RNA, 22 nt, Artificial Sequence
  Synthetic oligonucleotide
  hsa-miR-373-5p MIMAT0000725
acucaaaaugggggcgcuuucc

SEQ ID NO: 769 - RNA, 19 nt, Artificial Sequence
  Synthetic oligonucleotide
  hsa-miR-564 MIMAT0003228
aggcacggugucagcaggc

SEQ ID NO: 770 - RNA, 22 nt, Artificial Sequence
  Synthetic oligonucleotide
  hsa-miR-548o-5p MIMAT0022738
aaaaguaauugcgguuuuugcc

SEQ ID NO: 771 - RNA, 22 nt, Artificial Sequence
  Synthetic oligonucleotide
  hsa-miR-367-3p MIMAT0000719
aauugcacuuuagcaaugguga

SEQ ID NO: 772 - RNA, 22 nt, Artificial Sequence
  Synthetic oligonucleotide
  hsa-miR-601 MIMAT0003269
uggucuaggauuguuggaggag

SEQ ID NO: 773 - RNA, 19 nt, Artificial Sequence
  Synthetic oligonucleotide
  hsa-miR-4327 MIMAT0016889
ggcuugcaugggggacugg

SEQ ID NO: 774 - RNA, 26 nt, Artificial Sequence
  Synthetic oligonucleotide
  hsa-miR-4665-3p MIMAT0019740
cucggccgcggcgcguagcccccgcc

SEQ ID NO: 775 - RNA, 21 nt, Artificial Sequence
  Synthetic oligonucleotide
  hsa-miR-4437 MIMAT0018953
ugggcucaggguacaaagguu

SEQ ID NO: 776 - RNA, 22 nt, Artificial Sequence
  Synthetic oligonucleotide
  hsa-miR-548aq-3p MIMAT0022264
caaaaacugcaauuacuuuugc

SEQ ID NO: 777 - RNA, 22 nt, Artificial Sequence
  Synthetic oligonucleotide
  hsa-miR-5191 MIMAT0021122
aggauaggaagaaugaagugcu

SEQ ID NO: 778 - RNA, 22 nt, Artificial Sequence
  Synthetic oligonucleotide
  hsa-miR-4738-3p MIMAT0019867
ugaaacuggagcgccuggagga

SEQ ID NO: 779 - RNA, 22 nt, Artificial Sequence
  Synthetic oligonucleotide
  hsa-miR-876-3p MIMAT0004925
uggugguuuacaaaguaauuca

SEQ ID NO: 780 - RNA, 22 nt, Artificial Sequence
  Synthetic oligonucleotide
  hsa-miR-6792-3p MIMAT0027485
cuccuccacagccccugcucau

SEQ ID NO: 781 - RNA, 22 nt, Artificial Sequence
  Synthetic oligonucleotide
  hsa-miR-3922-3p MIMAT0018197
ucuggccuugacuugacucuuu

SEQ ID NO: 782 - RNA, 23 nt, Artificial Sequence
  Synthetic oligonucleotide
  hsa-miR-423-5p MIMAT0004748
ugaggggcagagagcgagacuuu

SEQ ID NO: 783 - RNA, 26 nt, Artificial Sequence
  Synthetic oligonucleotide
  hsa-miR-1272 MIMAT0005925
gaugaugauggcagcaaauucugaaa

SEQ ID NO: 784 - RNA, 18 nt, Artificial Sequence
  Synthetic oligonucleotide
  hsa-miR-4434 MIMAT0018950
aggagaaguaaaguagaa

SEQ ID NO: 785 - RNA, 22 nt, Artificial Sequence
  Synthetic oligonucleotide
  hsa-miR-200a-3p MIMAT0000682
uaacacugucugguaacgaugu

SEQ ID NO: 786 - RNA, 19 nt, Artificial Sequence
  Synthetic oligonucleotide
  hsa-miR-6870-5p MIMAT0027640
ugggggagauggggguuga

SEQ ID NO: 787 - RNA, 21 nt, Artificial Sequence
  Synthetic oligonucleotide
  hsa-miR-509-5p MIMAT0004779
uacugcagacaguggcaauca

SEQ ID NO: 788 - RNA, 20 nt, Artificial Sequence
  Synthetic oligonucleotide
  hsa-miR-4313 MIMAT0016865
agcccccuggccccaaaccc

SEQ ID NO: 789 - RNA, 22 nt, Artificial Sequence
  Synthetic oligonucleotide
  hsa-miR-944 MIMAT0004987
aaauuauuguacaucggaugag

SEQ ID NO: 790 - RNA, 23 nt, Artificial Sequence
  Synthetic oligonucleotide
  hsa-miR-3184-3p MIMAT0022731
aaagucucgcucucugccccuca

SEQ ID NO: 791 - RNA, 22 nt, Artificial Sequence
  Synthetic oligonucleotide
  hsa-miR-548e-3p MIMAT0005874
aaaaacugagacuacuuuugca

SEQ ID NO: 792 - RNA, 24 nt, Artificial Sequence
  Synthetic oligonucleotide
  hsa-miR-29b-1-5p MIMAT0004514
gcugguuucauauggugguuuaga

SEQ ID NO: 793 - RNA, 22 nt, Artificial Sequence
  Synthetic oligonucleotide
  hsa-miR-1265 MIMAT0005918
caggauguggucaaguguuguu

SEQ ID NO: 794 - RNA, 22 nt, Artificial Sequence
  Synthetic oligonucleotide
  hsa-miR-548ac MIMAT0018938
caaaaaccggcaauuacuuuug

SEQ ID NO: 795 - RNA, 22 nt, Artificial Sequence
  Synthetic oligonucleotide
  hsa-miR-1343-3p MIMAT0019776
cuccuggggcccgcacucucgc

SEQ ID NO: 796 - RNA, 22 nt, Artificial Sequence
  Synthetic oligonucleotide
  hsa-miR-515-3p MIMAT0002827
gagugccuucuuuuggagcguu

SEQ ID NO: 797 - RNA, 21 nt, Artificial Sequence
  Synthetic oligonucleotide
  hsa-miR-5694 MIMAT0022487
cagaucaugggacugucucag

SEQ ID NO: 798 - RNA, 23 nt, Artificial Sequence
  Synthetic oligonucleotide
  hsa-miR-3166 MIMAT0015040
cgcagacaaugccuacuggccua

SEQ ID NO: 799 - RNA, 22 nt, Artificial Sequence
  Synthetic oligonucleotide
  hsa-miR-203b-5p MIMAT0019813
uagugguccuaaacauuucaca

SEQ ID NO: 800 - RNA, 21 nt, Artificial Sequence
  Synthetic oligonucleotide
  hsa-miR-410-3p MIMAT0002171
aauauaacacagauggccugu

SEQ ID NO: 801 - RNA, 17 nt, Artificial Sequence
  Synthetic oligonucleotide
  hsa-miR-4317 MIMAT0016872
acauugccagggaguuu

SEQ ID NO: 802 - RNA, 22 nt, Artificial Sequence
  Synthetic oligonucleotide
  hsa-miR-3164 MIMAT0015038
ugugacuuuaagggaaauggcg

SEQ ID NO: 803 - RNA, 22 nt, Artificial Sequence
  Synthetic oligonucleotide
  hsa-miR-365b-3p MIMAT0022834
uaaugccccuaaaaauccuuau

SEQ ID NO: 804 - RNA, 22 nt, Artificial Sequence
  Synthetic oligonucleotide
  hsa-miR-216a-5p MIMAT0000273
uaaucucagcuggcaacuguga

SEQ ID NO: 805 - RNA, 23 nt, Artificial Sequence
  Synthetic oligonucleotide
  hsa-miR-514a-5p MIMAT0022702
uacucuggagagugacaaucaug

SEQ ID NO: 806 - RNA, 20 nt, Artificial Sequence
  Synthetic oligonucleotide
  hsa-miR-3190-5p MIMAT0015073
ucuggccagcuacgucccca

SEQ ID NO: 807 - RNA, 24 nt, Artificial Sequence
  Synthetic oligonucleotide
  hsa-miR-6795-5p MIMAT0027490
uggggggacaggaugagaggcugu

SEQ ID NO: 808 - RNA, 22 nt, Artificial Sequence
  Synthetic oligonucleotide
  hsa-miR-4467 MIMAT0018994
uggcggcgguaguuaugggcuu

SEQ ID NO: 809 - RNA, 23 nt, Artificial Sequence
  Synthetic oligonucleotide
  hsa-miR-6734-5p MIMAT0027369
uugaggggagaaugagguggaga

SEQ ID NO: 810 - RNA, 23 nt, Artificial Sequence
  Synthetic oligonucleotide
  hsa-miR-155-5p MIMAT0000646
uuaaugcuaaucgugauaggggu

SEQ ID NO: 811 - RNA, 27 nt, Artificial Sequence
  Synthetic oligonucleotide
  hsa-miR-1183 MIMAT0005828
cacuguaggugauggugagagugggca

SEQ ID NO: 812 - RNA, 20 nt, Artificial Sequence
  Synthetic oligonucleotide
  hsa-miR-548x-3p MIMAT0015081
uaaaaacugcaauuacuuuc

SEQ ID NO: 813 - RNA, 21 nt, Artificial Sequence
  Synthetic oligonucleotide
  hsa-miR-4694-3p MIMAT0019787
caaauggacaggauaacaccu

SEQ ID NO: 814 - RNA, 22 nt, Artificial Sequence
  Synthetic oligonucleotide
  hsa-miR-3144-5p MIMAT0015014
aggggaccaaagagauauauag

SEQ ID NO: 815 - RNA, 22 nt, Artificial Sequence
  Synthetic oligonucleotide
  hsa-let-7d-3p MIMAT0004484
cuauacgaccugcugccuuucu

SEQ ID NO: 816 - RNA, 23 nt, Artificial Sequence
  Synthetic oligonucleotide
  hsa-miR-520g-5p MIMAT0026611
ucuagaggaagcacuuucuguuu

SEQ ID NO: 817 - RNA, 21 nt, Artificial Sequence
  Synthetic oligonucleotide
  hsa-miR-7854-3p MIMAT0030429
ugaggugaccgcagaugggaa

SEQ ID NO: 818 - RNA, 18 nt, Artificial Sequence
  Synthetic oligonucleotide
  hsa-miR-3652 MIMAT0018072
cggcuggaggugugagga

SEQ ID NO: 819 - RNA, 17 nt, Artificial Sequence
  Synthetic oligonucleotide
  hsa-miR-1275 MIMAT0005929
gugggggagaggcuguc

SEQ ID NO: 820 - RNA, 22 nt, Artificial Sequence
  Synthetic oligonucleotide
  hsa-miR-500a-3p MIMAT0002871
augcaccugggcaaggauucug

SEQ ID NO: 821 - RNA, 21 nt, Artificial Sequence
  Synthetic oligonucleotide
  hsa-miR-552-3p MIMAT0003215
aacaggugacugguuagacaa

SEQ ID NO: 822 - RNA, 22 nt, Artificial Sequence
  Synthetic oligonucleotide
  hsa-miR-22-3p MIMAT0000077
aagcugccaguugaagaacugu

SEQ ID NO: 823 - RNA, 22 nt, Artificial Sequence
  Synthetic oligonucleotide
  hsa-miR-219a-2-3p MIMAT0004675
agaauuguggcuggacaucugu

SEQ ID NO: 824 - RNA, 22 nt, Artificial Sequence
  Synthetic oligonucleotide
  hsa-miR-570-5p MIMAT0022707
aaagguaauugcaguuuuuccc

SEQ ID NO: 825 - RNA, 21 nt, Artificial Sequence
  Synthetic oligonucleotide
  hsa-miR-411-5p MIMAT0003329
uaguagaccguauagcguacg

SEQ ID NO: 826 - RNA, 23 nt, Artificial Sequence
  Synthetic oligonucleotide
  hsa-miR-1288-5p MIMAT0026743
gcagaucaggacuguaacucacc

SEQ ID NO: 827 - RNA, 23 nt, Artificial Sequence
  Synthetic oligonucleotide
  hsa-miR-6884-3p MIMAT0027669
cccaucaccuuuccgucuccccu

SEQ ID NO: 828 - RNA, 22 nt, Artificial Sequence
  Synthetic oligonucleotide
  hsa-miR-891b MIMAT0004913
ugcaacuuaccugagucauuga

SEQ ID NO: 829 - RNA, 21 nt, Artificial Sequence
  Synthetic oligonucleotide
  hsa-miR-3606-5p MIMAT0017983
uuagugaaggcuauuuuaauu

SEQ ID NO: 830 - RNA, 24 nt, Artificial Sequence
  Synthetic oligonucleotide
  hsa-miR-3147 MIMAT0015019
gguugggcagugaggaggguguga

SEQ ID NO: 831 - RNA, 24 nt, Artificial Sequence
  Synthetic oligonucleotide
  hsa-miR-1247-3p MIMAT0022721
ccccgggaacgucgagacuggagc

SEQ ID NO: 832 - RNA, 22 nt, Artificial Sequence
  Synthetic oligonucleotide
  hsa-miR-5700 MIMAT0022493
uaaugcauuaaauuauugaagg

SEQ ID NO: 833 - RNA, 23 nt, Artificial Sequence
  Synthetic oligonucleotide
  hsa-miR-4653-3p MIMAT0019719
uggaguuaaggguugcuuggaga

SEQ ID NO: 834 - RNA, 22 nt, Artificial Sequence
  Synthetic oligonucleotide
  hsa-miR-1252-3p MIMAT0026744
caaaugagcuuaauuuccuuuu

SEQ ID NO: 835 - RNA, 23 nt, Artificial Sequence
  Synthetic oligonucleotide
  hsa-miR-5090 MIMAT0021082
ccggggcagauugguguagggug

SEQ ID NO: 836 - RNA, 22 nt, Artificial Sequence
  Synthetic oligonucleotide
  hsa-miR-365a-3p MIMAT0000710
uaaugccccuaaaaauccuuau

SEQ ID NO: 837 - RNA, 20 nt, Artificial Sequence
  Synthetic oligonucleotide
  hsa-miR-7154-3p MIMAT0028219
aggaggacaaguugugggau

SEQ ID NO: 838 - RNA, 22 nt, Artificial Sequence
  Synthetic oligonucleotide
  hsa-miR-3179 MIMAT0015056
agaaggggugaaauuuaaacgu

SEQ ID NO: 839 - RNA, 21 nt, Artificial Sequence
  Synthetic oligonucleotide
  hsa-miR-6792-5p MIMAT0027484
guaagcaggggcucuggguga

SEQ ID NO: 840 - RNA, 22 nt, Artificial Sequence
  Synthetic oligonucleotide
  hsa-miR-3152-5p MIMAT0019207
auugccucuguucuaacacaag

SEQ ID NO: 841 - RNA, 22 nt, Artificial Sequence
  Synthetic oligonucleotide
  hsa-miR-744-3p MIMAT0004946
cuguugccacuaaccucaaccu

SEQ ID NO: 842 - RNA, 22 nt, Artificial Sequence
  Synthetic oligonucleotide
  hsa-miR-138-2-3p MIMAT0004596
gcuauuucacgacaccaggguu

SEQ ID NO: 843 - RNA, 23 nt, Artificial Sequence
  Synthetic oligonucleotide
  hsa-miR-8084 MIMAT0031011
gaauacuaaguaaaaaaucagua

SEQ ID NO: 844 - RNA, 22 nt, Artificial Sequence
  Synthetic oligonucleotide
  hsa-miR-5707 MIMAT0022501
acguuugaaugcuguacaaggc

SEQ ID NO: 845 - RNA, 23 nt, Artificial Sequence
  Synthetic oligonucleotide
  hsa-miR-8081 MIMAT0031008
cuugagucgugccuuucugaaug

SEQ ID NO: 846 - RNA, 22 nt, Artificial Sequence
  Synthetic oligonucleotide
  hsa-miR-502-3p MIMAT0004775
aaugcaccugggcaaggauuca

SEQ ID NO: 847 - RNA, 23 nt, Artificial Sequence
  Synthetic oligonucleotide
  hsa-miR-3937 MIMAT0018352
acaggcggcuguagcaauggggg

SEQ ID NO: 848 - RNA, 21 nt, Artificial Sequence
  Synthetic oligonucleotide
  hsa-miR-3064-5p MIMAT0019864
ucuggcuguuguggugugcaa

SEQ ID NO: 849 - RNA, 22 nt, Artificial Sequence
  Synthetic oligonucleotide
  hsa-miR-509-3-5p MIMAT0004975
uacugcagacguggcaaucaug

SEQ ID NO: 850 - RNA, 22 nt, Artificial Sequence
  Synthetic oligonucleotide
  hsa-miR-889-5p MIMAT0026719
aauggcuguccguaguaugguc

SEQ ID NO: 851 - RNA, 21 nt, Artificial Sequence
  Synthetic oligonucleotide
  hsa-miR-6745 MIMAT0027391
uggguggaagaaggucugguu

SEQ ID NO: 852 - RNA, 21 nt, Artificial Sequence
  Synthetic oligonucleotide
  hsa-miR-3918 MIMAT0018192
acagggccgcagauggagacu

SEQ ID NO: 853 - RNA, 22 nt, Artificial Sequence
  Synthetic oligonucleotide
  hsa-miR-4755-5p MIMAT0019895
uuucccuucagagccuggcuuu

SEQ ID NO: 854 - RNA, 22 nt, Artificial Sequence
  Synthetic oligonucleotide
  hsa-miR-3619-3p MIMAT0019219
gggaccauccugccugcugugg

SEQ ID NO: 855 - RNA, 18 nt, Artificial Sequence
  Synthetic oligonucleotide
  hsa-miR-500b-5p MIMAT0016925
aauccuugcuaccugggu

SEQ ID NO: 856 - RNA, 22 nt, Artificial Sequence
  Synthetic oligonucleotide
  hsa-miR-192-3p MIMAT0004543
cugccaauuccauaggucacag

SEQ ID NO: 857 - RNA, 17 nt, Artificial Sequence
  Synthetic oligonucleotide
  hsa-miR-4296 MIMAT0016845
augugggcucaggcuca

SEQ ID NO: 858 - RNA, 22 nt, Artificial Sequence
  Synthetic oligonucleotide
  hsa-miR-517a-3p MIMAT0002852
aucgugcaucccuuuagagugu

SEQ ID NO: 859 - RNA, 21 nt, Artificial Sequence
  Synthetic oligonucleotide
  hsa-miR-873-5p MIMAT0004953
gcaggaacuugugagucuccu

SEQ ID NO: 860 - RNA, 22 nt, Artificial Sequence
  Synthetic oligonucleotide
  hsa-miR-1233-5p MIMAT0022943
agugggaggccagggcacggca

SEQ ID NO: 861 - RNA, 22 nt, Artificial Sequence
  Synthetic oligonucleotide
  hsa-miR-1266-3p MIMAT0026742
cccuguucuaugcccugaggga

SEQ ID NO: 862 - RNA, 22 nt, Artificial Sequence
  Synthetic oligonucleotide
  hsa-miR-2114-5p MIMAT0011156
uagucccuuccuugaagcgguc

SEQ ID NO: 863 - RNA, 22 nt, Artificial Sequence
  Synthetic oligonucleotide
  hsa-miR-222-5p MIMAT0004569
cucaguagccaguguagauccu

SEQ ID NO: 864 - RNA, 22 nt, Artificial Sequence
  Synthetic oligonucleotide
  hsa-miR-542-3p MIMAT0003389
ugugacagauugauaacugaaa

SEQ ID NO: 865 - RNA, 22 nt, Artificial Sequence
  Synthetic oligonucleotide
  hsa-miR-4768-5p MIMAT0019920
auucucucuggaucccauggau

SEQ ID NO: 866 - RNA, 22 nt, Artificial Sequence
  Synthetic oligonucleotide
  hsa-miR-589-5p MIMAT0004799
ugagaaccacgucugcucugag

SEQ ID NO: 867 - RNA, 22 nt, Artificial Sequence
  Synthetic oligonucleotide
  hsa-miR-16-1-3p MIMAT0004489
ccaguauuaacugugcugcuga

SEQ ID NO: 868 - RNA, 22 nt, Artificial Sequence
  Synthetic oligonucleotide
  hsa-miR-181c-3p MIMAT0004559
aaccaucgaccguugaguggac

SEQ ID NO: 869 - RNA, 22 nt, Artificial Sequence
  Synthetic oligonucleotide
  hsa-miR-517b-3p MIMAT0002857
aucgugcaucccuuuagagugu

SEQ ID NO: 870 - RNA, 22 nt, Artificial Sequence
  Synthetic oligonucleotide
  hsa-miR-548o-3p MIMAT0005919
ccaaaacugcaguuacuuuugc

SEQ ID NO: 871 - RNA, 21 nt, Artificial Sequence
  Synthetic oligonucleotide
  hsa-miR-624-3p MIMAT0004807
cacaagguauugguauuaccu

SEQ ID NO: 872 - RNA, 24 nt, Artificial Sequence
  Synthetic oligonucleotide
  hsa-miR-6766-5p MIMAT0027432
cgggugggagcagaucuuauugag

SEQ ID NO: 873 - RNA, 22 nt, Artificial Sequence
  Synthetic oligonucleotide
  hsa-miR-4777-3p MIMAT0019935
auaccucaucuagaaugcugua

SEQ ID NO: 874 - RNA, 22 nt, Artificial Sequence
  Synthetic oligonucleotide
  hsa-miR-181a-2-3p MIMAT0004558
accacugaccguugacuguacc

SEQ ID NO: 875 - RNA, 22 nt, Artificial Sequence
  Synthetic oligonucleotide
  hsa-miR-6814-5p MIMAT0027528
ucccaagggugagaugcugcca

SEQ ID NO: 876 - RNA, 21 nt, Artificial Sequence
  Synthetic oligonucleotide
  hsa-miR-4732-3p MIMAT0019856
gcccugaccuguccuguucug

SEQ ID NO: 877 - RNA, 22 nt, Artificial Sequence
  Synthetic oligonucleotide
  hsa-miR-335-3p MIMAT0004703
uuuuucauuauugcuccugacc

SEQ ID NO: 878 - RNA, 22 nt, Artificial Sequence
  Synthetic oligonucleotide
  hsa-miR-5581-5p MIMAT0022275
agccuuccaggagaaauggaga

SEQ ID NO: 879 - RNA, 22 nt, Artificial Sequence
  Synthetic oligonucleotide
  hsa-miR-27a-5p MIMAT0004501
agggcuuagcugcuugugagca

SEQ ID NO: 880 - RNA, 22 nt, Artificial Sequence
  Synthetic oligonucleotide
  hsa-miR-875-5p MIMAT0004922
uauaccucaguuuuaucaggug

SEQ ID NO: 881 - RNA, 22 nt, Artificial Sequence
  Synthetic oligonucleotide
  hsa-miR-942-3p MIMAT0026734
cacauggccgaaacagagaagu

SEQ ID NO: 882 - RNA, 21 nt, Artificial Sequence
  Synthetic oligonucleotide
  hsa-miR-4269 MIMAT0016897
gcaggcacagacagcccuggc

SEQ ID NO: 883 - RNA, 21 nt, Artificial Sequence
  Synthetic oligonucleotide
  hsa-miR-376a-2-5p MIMAT0022928
gguagauuuuccuucuauggu

SEQ ID NO: 884 - RNA, 21 nt, Artificial Sequence
  Synthetic oligonucleotide
  hsa-miR-650 MIMAT0003320
aggaggcagcgcucucaggac

SEQ ID NO: 885 - RNA, 21 nt, Artificial Sequence
  Synthetic oligonucleotide
  hsa-miR-1245a MIMAT0005897
aagugaucuaaaggccuacau

SEQ ID NO: 886 - RNA, 22 nt, Artificial Sequence
  Synthetic oligonucleotide
  hsa-miR-6884-5p MIMAT0027668
agaggcugagaaggugauguug

SEQ ID NO: 887 - RNA, 23 nt, Artificial Sequence
  Synthetic oligonucleotide
  hsa-miR-1184 MIMAT0005829
ccugcagcgacuugauggcuucc

SEQ ID NO: 888 - RNA, 18 nt, Artificial Sequence
  Synthetic oligonucleotide
  hsa-miR-4256 MIMAT0016877
aucugaccugaugaaggu

SEQ ID NO: 889 - RNA, 22 nt, Artificial Sequence
  Synthetic oligonucleotide
  hsa-miR-517-5p MIMAT0002851
ccucuagauggaagcacugucu

SEQ ID NO: 890 - RNA, 21 nt, Artificial Sequence
  Synthetic oligonucleotide
  hsa-miR-4480 MIMAT0019014
agccaaguggaaguuacuuua

SEQ ID NO: 891 - RNA, 21 nt, Artificial Sequence
  Synthetic oligonucleotide
  hsa-miR-4635 MIMAT0019692
ucuugaagucagaacccgcaa

SEQ ID NO: 892 - RNA, 17 nt, Artificial Sequence
  Synthetic oligonucleotide
  hsa-miR-4531 MIMAT0019070
auggagaaggcuucuga

SEQ ID NO: 893 - RNA, 21 nt, Artificial Sequence
  Synthetic oligonucleotide
  hsa-miR-6892-3p MIMAT0027685
ucccucucccaccccuugcag

SEQ ID NO: 894 - RNA, 21 nt, Artificial Sequence
  Synthetic oligonucleotide
  hsa-miR-4797-5p MIMAT0019972
gacagagugccacuuacugaa

SEQ ID NO: 895 - RNA, 23 nt, Artificial Sequence
  Synthetic oligonucleotide
  hsa-miR-18b-5p MIMAT0001412
uaaggugcaucuagugcaguuag

SEQ ID NO: 896 - RNA, 23 nt, Artificial Sequence
  Synthetic oligonucleotide
  hsa-miR-18a-5p MIMAT0000072
uaaggugcaucuagugcagauag

SEQ ID NO: 897 - RNA, 22 nt, Artificial Sequence
  Synthetic oligonucleotide
  hsa-miR-4778-5p MIMAT0019936
aauucuguaaaggaagaagagg

SEQ ID NO: 898 - RNA, 23 nt, Artificial Sequence
  Synthetic oligonucleotide
  hsa-miR-3943 MIMAT0018359
uagcccccaggcuucacuuggcg

SEQ ID NO: 899 - RNA, 22 nt, Artificial Sequence
  Synthetic oligonucleotide
  hsa-miR-6773-3p MIMAT0027447
acugucacuucucugcccauag

SEQ ID NO: 900 - RNA, 22 nt, Artificial Sequence
  Synthetic oligonucleotide
  hsa-miR-6507-3p MIMAT0025471
caaaguccuuccuauuuuuccc

SEQ ID NO: 901 - RNA, 22 nt, Artificial Sequence
  Synthetic oligonucleotide
  hsa-miR-7-1-3p MIMAT0004553
caacaaaucacagucugccaua

SEQ ID NO: 902 - RNA, 19 nt, Artificial Sequence
  Synthetic oligonucleotide
  hsa-miR-378j MIMAT0024612
acuggauuuggagccagaa

SEQ ID NO: 903 - RNA, 22 nt, Artificial Sequence
  Synthetic oligonucleotide
  hsa-miR-6839-5p MIMAT0027580
ucuggauugaagagacgaccca

SEQ ID NO: 904 - RNA, 22 nt, Artificial Sequence
  Synthetic oligonucleotide
  hsa-miR-6788-3p MIMAT0027477
uucgccacuucccucccugcag

SEQ ID NO: 905 - RNA, 21 nt, Artificial Sequence
  Synthetic oligonucleotide
  hsa-miR-337-5p MIMAT0004695
gaacggcuucauacaggaguu

SEQ ID NO: 906 - RNA, 19 nt, Artificial Sequence
  Synthetic oligonucleotide
  hsa-miR-4800-3p MIMAT0019979
cauccguccgucuguccac

SEQ ID NO: 907 - RNA, 22 nt, Artificial Sequence
  Synthetic oligonucleotide
  hsa-miR-374a-5p MIMAT0000727
uuauaauacaaccugauaagug

SEQ ID NO: 908 - RNA, 21 nt, Artificial Sequence
  Synthetic oligonucleotide
  hsa-miR-6513-3p MIMAT0025483
ucaagugucaucugucccuag

SEQ ID NO: 909 - RNA, 22 nt, Artificial Sequence
  Synthetic oligonucleotide
  hsa-miR-4524a-5p MIMAT0019062
auagcagcaugaaccugucuca

SEQ ID NO: 910 - RNA, 22 nt, Artificial Sequence
  Synthetic oligonucleotide
  hsa-miR-28-3p MIMAT0004502
cacuagauugugagcuccugga

SEQ ID NO: 911 - RNA, 23 nt, Artificial Sequence
  Synthetic oligonucleotide
  hsa-miR-4640-5p MIMAT0019699
ugggccagggagcagcugguggg

SEQ ID NO: 912 - RNA, 21 nt, Artificial Sequence
  Synthetic oligonucleotide
  hsa-miR-3611 MIMAT0017988
uugugaagaaagaaauucuua

SEQ ID NO: 913 - RNA, 22 nt, Artificial Sequence
  Synthetic oligonucleotide
  hsa-miR-8070 MIMAT0030997
augugauugacggcugacucca

SEQ ID NO: 914 - RNA, 23 nt, Artificial Sequence
  Synthetic oligonucleotide
  hsa-miR-10a-5p MIMAT0000253
uacccuguagauccgaauuugug

SEQ ID NO: 915 - RNA, 22 nt, Artificial Sequence
  Synthetic oligonucleotide
  hsa-miR-29b-2-5p MIMAT0004515
cugguuucacaugguggcuuag

SEQ ID NO: 916 - RNA, 22 nt, Artificial Sequence
  Synthetic oligonucleotide
  hsa-miR-4727-3p MIMAT0019848
auagugggaagcuggcagauuc

SEQ ID NO: 917 - RNA, 22 nt, Artificial Sequence
  Synthetic oligonucleotide
  hsa-miR-561-3p MIMAT0003225
caaaguuuaagauccuugaagu

SEQ ID NO: 918 - RNA, 22 nt, Artificial Sequence
  Synthetic oligonucleotide
  hsa-miR-514b-5p MIMAT0015087
uucucaagagggaggcaaucau

SEQ ID NO: 919 - RNA, 25 nt, Artificial Sequence
  Synthetic oligonucleotide
  hsa-miR-638 MIMAT0003308
agggaucgcgggcggguggcggccu

SEQ ID NO: 920 - RNA, 22 nt, Artificial Sequence
  Synthetic oligonucleotide
  hsa-miR-6516-5p MIMAT0030417
uuugcaguaacaggugugagca

SEQ ID NO: 921 - RNA, 20 nt, Artificial Sequence
  Synthetic oligonucleotide
  hsa-miR-3607-3p MIMAT0017985
acuguaaacgcuuucugaug

SEQ ID NO: 922 - RNA, 22 nt, Artificial Sequence
  Synthetic oligonucleotide
  hsa-miR-3146 MIMAT0015018
caugcuaggauagaaagaaugg

SEQ ID NO: 923 - RNA, 22 nt, Artificial Sequence
  Synthetic oligonucleotide
  hsa-miR-4707-3p MIMAT0019808
agcccgccccagccgagguucu

SEQ ID NO: 924 - RNA, 22 nt, Artificial Sequence
  Synthetic oligonucleotide
  hsa-miR-6860 MIMAT0027622
acugggcagggcuguggugagu

SEQ ID NO: 925 - RNA, 16 nt, Artificial Sequence
  Synthetic oligonucleotide
  hsa-miR-4267 MIMAT0016893
uccagcucgguggcac

SEQ ID NO: 926 - RNA, 18 nt, Artificial Sequence
  Synthetic oligonucleotide
  hsa-miR-4325 MIMAT0016887
uugcacuugucucaguga

SEQ ID NO: 927 - RNA, 22 nt, Artificial Sequence
  Synthetic oligonucleotide
  hsa-miR-510-5p MIMAT0002882
uacucaggagaguggcaaucac

SEQ ID NO: 928 - RNA, 21 nt, Artificial Sequence
  Synthetic oligonucleotide
  hsa-miR-5587-3p MIMAT0022290
gccccgggcagugugaucauc

SEQ ID NO: 929 - RNA, 23 nt, Artificial Sequence
  Synthetic oligonucleotide
  hsa-miR-4726-5p MIMAT0019845
agggccagaggagccuggagugg

SEQ ID NO: 930 - RNA, 22 nt, Artificial Sequence
  Synthetic oligonucleotide
  hsa-miR-490-3p MIMAT0002806
caaccuggaggacuccaugcug

SEQ ID NO: 931 - RNA, 21 nt, Artificial Sequence
  Synthetic oligonucleotide
  hsa-miR-647 MIMAT0003317
guggcugcacucacuuccuuc

SEQ ID NO: 932 - RNA, 22 nt, Artificial Sequence
  Synthetic oligonucleotide
  hsa-miR-4726-3p MIMAT0019846
acccagguucccucuggccgca

SEQ ID NO: 933 - RNA, 21 nt, Artificial Sequence
  Synthetic oligonucleotide
  hsa-miR-559 MIMAT0003223
uaaaguaaauaugcaccaaaa

SEQ ID NO: 934 - RNA, 21 nt, Artificial Sequence
  Synthetic oligonucleotide
  hsa-miR-101-3p MIMAT0000099
uacaguacugugauaacugaa

SEQ ID NO: 935 - RNA, 23 nt, Artificial Sequence
  Synthetic oligonucleotide
  hsa-miR-4644 MIMAT0019704
uggagagagaaaagagacagaag

SEQ ID NO: 936 - RNA, 20 nt, Artificial Sequence
  Synthetic oligonucleotide
  hsa-miR-6716-5p MIMAT0025844
ugggaauggggguaagggcc

SEQ ID NO: 937 - RNA, 22 nt, Artificial Sequence
  Synthetic oligonucleotide
  hsa-miR-301b-5p MIMAT0032026
gcucugacgagguugcacuacu

SEQ ID NO: 938 - RNA, 23 nt, Artificial Sequence
  Synthetic oligonucleotide
  hsa-miR-3134 MIMAT0015000
ugauggauaaaagacuacauauu

SEQ ID NO: 939 - RNA, 22 nt, Artificial Sequence
  Synthetic oligonucleotide
  hsa-miR-127-5p MIMAT0004604
cugaagcucagagggcucugau

SEQ ID NO: 940 - RNA, 24 nt, Artificial Sequence
  Synthetic oligonucleotide
  hsa-miR-4663 MIMAT0019735
agcugagcuccauggacgugcagu

SEQ ID NO: 941 - RNA, 22 nt, Artificial Sequence
  Synthetic oligonucleotide
  hsa-miR-193b-3p MIMAT0002819
aacuggcccucaaagucccgcu

SEQ ID NO: 942 - RNA, 24 nt, Artificial Sequence
  Synthetic oligonucleotide
  hsa-miR-589-3p MIMAT0003256
ucagaacaaaugccgguucccaga

SEQ ID NO: 943 - RNA, 18 nt, Artificial Sequence
  Synthetic oligonucleotide
  hsa-miR-6861-3p MIMAT0027624
uggaccucuccuccccag

SEQ ID NO: 944 - RNA, 17 nt, Artificial Sequence
  Synthetic oligonucleotide
  hsa-miR-4419a MIMAT0018931
ugagggaggagacugca

SEQ ID NO: 945 - RNA, 20 nt, Artificial Sequence
  Synthetic oligonucleotide
  hsa-miR-6722-5p MIMAT0025853
aggcgcacccgaccacaugc

SEQ ID NO: 946 - RNA, 21 nt, Artificial Sequence
  Synthetic oligonucleotide
  hsa-miR-7853-5p MIMAT0030428
ucaaaugcagauccugacuuc

SEQ ID NO: 947 - RNA, 22 nt, Artificial Sequence
  Synthetic oligonucleotide
  hsa-miR-5194 MIMAT0021125
ugagggguuuggaaugggaugg

SEQ ID NO: 948 - RNA, 22 nt, Artificial Sequence
  Synthetic oligonucleotide
  hsa-miR-520a-3p MIMAT0002834
aaagugcuucccuuuggacugu

SEQ ID NO: 949 - RNA, 23 nt, Artificial Sequence
  Synthetic oligonucleotide
  hsa-miR-3192-5p MIMAT0015076
ucugggagguuguagcaguggaa

SEQ ID NO: 950 - RNA, 21 nt, Artificial Sequence
  Synthetic oligonucleotide
  hsa-miR-6836-3p MIMAT0027575
augccucccccggccccgcag

SEQ ID NO: 951 - RNA, 23 nt, Artificial Sequence
  Synthetic oligonucleotide
  hsa-miR-597-3p MIMAT0026619
ugguucucuuguggcucaagcgu

SEQ ID NO: 952 - RNA, 23 nt, Artificial Sequence
  Synthetic oligonucleotide
  hsa-miR-548x-5p MIMAT0022733
ugcaaaaguaauugcaguuuuug

SEQ ID NO: 953 - RNA, 21 nt, Artificial Sequence
  Synthetic oligonucleotide
  hsa-miR-6888-3p MIMAT0027677
aucugucucgauuguuuccag

SEQ ID NO: 954 - RNA, 22 nt, Artificial Sequence
  Synthetic oligonucleotide
  hsa-miR-6793-5p MIMAT0027486
uguggguucuggguugggguga

SEQ ID NO: 955 - RNA, 24 nt, Artificial Sequence
  Synthetic oligonucleotide
  hsa-miR-8075 MIMAT0031002
ugcugauggcagaugucgggucug

SEQ ID NO: 956 - RNA, 22 nt, Artificial Sequence
  Synthetic oligonucleotide
  hsa-miR-1471 MIMAT0007349
gcccgcguguggagccaggugu

SEQ ID NO: 957 - RNA, 21 nt, Artificial Sequence
  Synthetic oligonucleotide
  hsa-miR-5590-3p MIMAT0022300
aauaaaguucauguauggcaa

SEQ ID NO: 958 - RNA, 22 nt, Artificial Sequence
  Synthetic oligonucleotide
  hsa-miR-24-3p MIMAT0000080
uggcucaguucagcaggaacag

SEQ ID NO: 959 - RNA, 22 nt, Artificial Sequence
  Synthetic oligonucleotide
  hsa-miR-6825-5p MIMAT0027550
uggggagguguggagucagcau

SEQ ID NO: 960 - RNA, 22 nt, Artificial Sequence
  Synthetic oligonucleotide
  hsa-miR-3934-5p MIMAT0018349
ucagguguggaaacugaggcag

SEQ ID NO: 961 - RNA, 21 nt, Artificial Sequence
  Synthetic oligonucleotide
  hsa-miR-6508-5p MIMAT0025472
ucuagaaaugcaugacccacc

SEQ ID NO: 962 - RNA, 20 nt, Artificial Sequence
  Synthetic oligonucleotide
  hsa-miR-1238-3p MIMAT0005593
cuuccucgucugucugcccc

SEQ ID NO: 963 - RNA, 22 nt, Artificial Sequence
  Synthetic oligonucleotide
  hsa-miR-598-3p MIMAT0003266
uacgucaucguugucaucguca

SEQ ID NO: 964 - RNA, 23 nt, Artificial Sequence
  Synthetic oligonucleotide
  hsa-miR-6773-5p MIMAT0027446
uugggcccaggaguaaacaggau

SEQ ID NO: 965 - RNA, 20 nt, Artificial Sequence
  Synthetic oligonucleotide
  hsa-miR-548an MIMAT0019079
aaaaggcauugugguuuuug

SEQ ID NO: 966 - RNA, 22 nt, Artificial Sequence
  Synthetic oligonucleotide
  hsa-miR-134-5p MIMAT0000447
ugugacugguugaccagagggg

SEQ ID NO: 967 - RNA, 22 nt, Artificial Sequence
  Synthetic oligonucleotide
  hsa-miR-7157-3p MIMAT0028225
ucugugcuacuggaugaagagu

SEQ ID NO: 968 - RNA, 22 nt, Artificial Sequence
  Synthetic oligonucleotide
  hsa-miR-4512 MIMAT0019049
cagggccucacuguaucgccca

SEQ ID NO: 969 - RNA, 22 nt, Artificial Sequence
  Synthetic oligonucleotide
  hsa-miR-6733-5p MIMAT0027367
ugggaaagacaaacucagaguu

SEQ ID NO: 970 - RNA, 22 nt, Artificial Sequence
  Synthetic oligonucleotide
  hsa-miR-6749-5p MIMAT0027398
ucgggccugggguugggggagc

SEQ ID NO: 971 - RNA, 21 nt, Artificial Sequence
  Synthetic oligonucleotide
  hsa-miR-182-3p MIMAT0000260
ugguucuagacuugccaacua

SEQ ID NO: 972 - RNA, 22 nt, Artificial Sequence
  Synthetic oligonucleotide
  hsa-miR-625-3p MIMAT0004808
gacuauagaacuuucccccuca

SEQ ID NO: 973 - RNA, 22 nt, Artificial Sequence
  Synthetic oligonucleotide
  hsa-miR-616-5p MIMAT0003284
acucaaaacccuucagugacuu

SEQ ID NO: 974 - RNA, 23 nt, Artificial Sequence
  Synthetic oligonucleotide
  hsa-miR-138-5p MIMAT0000430
agcugguguugugaaucaggccg

SEQ ID NO: 975 - RNA, 20 nt, Artificial Sequence
  Synthetic oligonucleotide
  hsa-miR-4448 MIMAT0018967
ggcuccuuggucuaggggua

SEQ ID NO: 976 - RNA, 18 nt, Artificial Sequence
  Synthetic oligonucleotide
  hsa-miR-4430 MIMAT0018945
aggcuggagugagcggag

SEQ ID NO: 977 - RNA, 21 nt, Artificial Sequence
  Synthetic oligonucleotide
  hsa-miR-3117-3p MIMAT0014979
auaggacucauauagugccag

SEQ ID NO: 978 - RNA, 23 nt, Artificial Sequence
  Synthetic oligonucleotide
  hsa-miR-3065-3p MIMAT0015378
ucagcaccaggauauuguuggag

SEQ ID NO: 979 - RNA, 17 nt, Artificial Sequence
  Synthetic oligonucleotide
  hsa-miR-6852-3p MIMAT0027605
uguccucuguuccucag

SEQ ID NO: 980 - RNA, 22 nt, Artificial Sequence
  Synthetic oligonucleotide
  hsa-miR-6505-5p MIMAT0025466
uuggaauaggggauaucucagc

SEQ ID NO: 981 - RNA, 23 nt, Artificial Sequence
  Synthetic oligonucleotide
  hsa-miR-365a-5p MIMAT0009199
agggacuuuugggggcagaugug

SEQ ID NO: 982 - RNA, 18 nt, Artificial Sequence
  Synthetic oligonucleotide
  hsa-miR-6816-3p MIMAT0027533
gaaggaccugcaccuucg

SEQ ID NO: 983 - RNA, 22 nt, Artificial Sequence
  Synthetic oligonucleotide
  hsa-miR-380-3p MIMAT0000735
uauguaauaugguccacaucuu

SEQ ID NO: 984 - RNA, 22 nt, Artificial Sequence
  Synthetic oligonucleotide
  hsa-miR-539-3p MIMAT0022705
aucauacaaggacaauuucuuu

SEQ ID NO: 985 - RNA, 19 nt, Artificial Sequence
  Synthetic oligonucleotide
  hsa-miR-4487 MIMAT0019021
agagcuggcugaagggcag

SEQ ID NO: 986 - RNA, 22 nt, Artificial Sequence
  Synthetic oligonucleotide
  hsa-miR-548n MIMAT0005916
caaaaguaauuguggauuuugu

SEQ ID NO: 987 - RNA, 23 nt, Artificial Sequence
  Synthetic oligonucleotide
  hsa-miR-217 MIMAT0000274
uacugcaucaggaacugauugga

SEQ ID NO: 988 - RNA, 22 nt, Artificial Sequence
  Synthetic oligonucleotide
  hsa-miR-892b MIMAT0004918
cacuggcuccuuucuggguaga

SEQ ID NO: 989 - RNA, 22 nt, Artificial Sequence
  Synthetic oligonucleotide
  hsa-miR-6805-5p MIMAT0027510
uagggggcggcuuguggagugu

SEQ ID NO: 990 - RNA, 22 nt, Artificial Sequence
  Synthetic oligonucleotide
  hsa-miR-3942-5p MIMAT0018358
aagcaauacuguuaccugaaau

SEQ ID NO: 991 - RNA, 21 nt, Artificial Sequence
  Synthetic oligonucleotide
  hsa-miR-1245b-5p MIMAT0019950
uaggccuuuagaucacuuaaa

SEQ ID NO: 992 - RNA, 22 nt, Artificial Sequence
  Synthetic oligonucleotide
  hsa-let-7e-3p MIMAT0004485
cuauacggccuccuagcuuucc

SEQ ID NO: 993 - RNA, 22 nt, Artificial Sequence
  Synthetic oligonucleotide
  hsa-miR-659-5p MIMAT0022710
aggaccuucccugaaccaagga

SEQ ID NO: 994 - RNA, 22 nt, Artificial Sequence
  Synthetic oligonucleotide
  hsa-miR-3191-5p MIMAT0022732
cucucuggccgucuaccuucca

SEQ ID NO: 995 - RNA, 21 nt, Artificial Sequence
  Synthetic oligonucleotide
  hsa-miR-6886-3p MIMAT0027673
ugcccuucucuccuccugccu

SEQ ID NO: 996 - RNA, 22 nt, Artificial Sequence
  Synthetic oligonucleotide
  hsa-miR-3180-3p MIMAT0015058
uggggcggagcuuccggaggcc

SEQ ID NO: 997 - RNA, 23 nt, Artificial Sequence
  Synthetic oligonucleotide
  hsa-miR-2467-5p MIMAT0019952
ugaggcucuguuagccuuggcuc

SEQ ID NO: 998 - RNA, 22 nt, Artificial Sequence
  Synthetic oligonucleotide
  hsa-miR-5688 MIMAT0022479
uaacaaacaccuguaaaacagc

SEQ ID NO: 999 - RNA, 21 nt, Artificial Sequence
  Synthetic oligonucleotide
  hsa-miR-6872-3p MIMAT0027645
cccaugccuccugccgcgguc

SEQ ID NO: 1000 - RNA, 21 nt, Artificial Sequence
  Synthetic oligonucleotide
  hsa-miR-1288-3p MIMAT0005942
uggacugcccugaucuggaga

SEQ ID NO: 1001 - RNA, 23 nt, Artificial Sequence
  Synthetic oligonucleotide
  hsa-miR-3679-5p MIMAT0018104
ugaggauauggcagggaagggga

SEQ ID NO: 1002 - RNA, 23 nt, Artificial Sequence
  Synthetic oligonucleotide
  hsa-miR-6867-5p MIMAT0027634
uguguguguagaggaagaaggga

SEQ ID NO: 1003 - RNA, 22 nt, Artificial Sequence
  Synthetic oligonucleotide
  hsa-miR-4494 MIMAT0019029
ccagacuguggcugaccagagg

SEQ ID NO: 1004 - RNA, 22 nt, Artificial Sequence
  Synthetic oligonucleotide
  hsa-miR-548c-5p MIMAT0004806
aaaaguaauugcgguuuuugcc

SEQ ID NO: 1005 - RNA, 23 nt, Artificial Sequence
  Synthetic oligonucleotide
  hsa-miR-128-1-5p MIMAT0026477
cggggccguagcacugucugaga

SEQ ID NO: 1006 - RNA, 19 nt, Artificial Sequence
  Synthetic oligonucleotide
  hsa-miR-7704 MIMAT0030019
cggggucggcggcgacgug

SEQ ID NO: 1007 - RNA, 22 nt, Artificial Sequence
  Synthetic oligonucleotide
  hsa-miR-15b-3p MIMAT0004586
cgaaucauuauuugcugcucua

SEQ ID NO: 1008 - RNA, 22 nt, Artificial Sequence
  Synthetic oligonucleotide
  hsa-miR-664b-3p MIMAT0022272
uucauuugccucccagccuaca

SEQ ID NO: 1009 - RNA, 24 nt, Artificial Sequence
  Synthetic oligonucleotide
  hsa-miR-4697-3p MIMAT0019792
ugucagugacuccugccccuuggu

SEQ ID NO: 1010 - RNA, 22 nt, Artificial Sequence
  Synthetic oligonucleotide
  hsa-miR-4645-3p MIMAT0019706
agacaguaguucuugccugguu

SEQ ID NO: 1011 - RNA, 19 nt, Artificial Sequence
  Synthetic oligonucleotide
  hsa-miR-4458 MIMAT0018980
agagguagguguggaagaa

SEQ ID NO: 1012 - RNA, 23 nt, Artificial Sequence
  Synthetic oligonucleotide
  hsa-miR-181b-5p MIMAT0000257
aacauucauugcugucggugggu

SEQ ID NO: 1013 - RNA, 22 nt, Artificial Sequence
  Synthetic oligonucleotide
  hsa-miR-196b-5p MIMAT0001080
uagguaguuuccuguuguuggg

SEQ ID NO: 1014 - RNA, 22 nt, Artificial Sequence
  Synthetic oligonucleotide
  hsa-miR-3934-3p MIMAT0022975
ugcucagguugcacagcuggga

SEQ ID NO: 1015 - RNA, 22 nt, Artificial Sequence
  Synthetic oligonucleotide
  hsa-miR-219b-5p MIMAT0019747
agauguccagccacaauucucg

SEQ ID NO: 1016 - RNA, 21 nt, Artificial Sequence
  Synthetic oligonucleotide
  hsa-miR-4746-3p MIMAT0019881
agcggugcuccugcgggccga

SEQ ID NO: 1017 - RNA, 23 nt, Artificial Sequence
  Synthetic oligonucleotide
  hsa-miR-1266-5p MIMAT0005920
ccucagggcuguagaacagggcu

SEQ ID NO: 1018 - RNA, 22 nt, Artificial Sequence
  Synthetic oligonucleotide
  hsa-miR-6791-5p MIMAT0027482
ccccuggggcugggcaggcgga

SEQ ID NO: 1019 - RNA, 23 nt, Artificial Sequence
  Synthetic oligonucleotide
  hsa-miR-409-5p MIMAT0001638
agguuacccgagcaacuuugcau

SEQ ID NO: 1020 - RNA, 23 nt, Artificial Sequence
  Synthetic oligonucleotide
  hsa-miR-508-5p MIMAT0004778
uacuccagagggcgucacucaug

SEQ ID NO: 1021 - RNA, 22 nt, Artificial Sequence
  Synthetic oligonucleotide
  hsa-miR-3909 MIMAT0018183
uguccucuagggccugcagucu

SEQ ID NO: 1022 - RNA, 22 nt, Artificial Sequence
  Synthetic oligonucleotide
  hsa-miR-4504 MIMAT0019040
ugugacaauagagaugaacaug

SEQ ID NO: 1023 - RNA, 22 nt, Artificial Sequence
  Synthetic oligonucleotide
  hsa-miR-6850-5p MIMAT0027600
gugcggaacgcuggccggggcg

SEQ ID NO: 1024 - RNA, 22 nt, Artificial Sequence
  Synthetic oligonucleotide
  hsa-miR-3683 MIMAT0018111
ugcgacauuggaaguaguauca

SEQ ID NO: 1025 - RNA, 21 nt, Artificial Sequence
  Synthetic oligonucleotide
  hsa-miR-587 MIMAT0003253
uuuccauaggugaugagucac

SEQ ID NO: 1026 - RNA, 18 nt, Artificial Sequence
  Synthetic oligonucleotide
  hsa-miR-4417 MIMAT0018929
ggugggcuucccggaggg

SEQ ID NO: 1027 - RNA, 22 nt, Artificial Sequence
  Synthetic oligonucleotide
  hsa-miR-4469 MIMAT0018996
gcucccucuagggucgcucgga

SEQ ID NO: 1028 - RNA, 22 nt, Artificial Sequence
  Synthetic oligonucleotide
  hsa-miR-6804-3p MIMAT0027509
cgcaccugccucucacccacag

SEQ ID NO: 1029 - RNA, 21 nt, Artificial Sequence
  Synthetic oligonucleotide
  hsa-miR-510-3p MIMAT0026613
auugaaaccucuaagagugga

SEQ ID NO: 1030 - RNA, 22 nt, Artificial Sequence
  Synthetic oligonucleotide
  hsa-miR-624-5p MIMAT0003293
uaguaccaguaccuuguguuca

SEQ ID NO: 1031 - RNA, 19 nt, Artificial Sequence
  Synthetic oligonucleotide
  hsa-miR-548ap-5p MIMAT0021037
aaaaguaauugcggucuuu

SEQ ID NO: 1032 - RNA, 20 nt, Artificial Sequence
  Synthetic oligonucleotide
  hsa-miR-3151-3p MIMAT0027026
ccugaucccacagcccaccu

SEQ ID NO: 1033 - RNA, 22 nt, Artificial Sequence
  Synthetic oligonucleotide
  hsa-miR-1304-5p MIMAT0005892
uuugaggcuacagugagaugug

SEQ ID NO: 1034 - RNA, 22 nt, Artificial Sequence
  Synthetic oligonucleotide
  hsa-miR-193b-5p MIMAT0004767
cgggguuuugagggcgagauga

SEQ ID NO: 1035 - RNA, 20 nt, Artificial Sequence
  Synthetic oligonucleotide
  hsa-miR-6074 MIMAT0023699
gauauucagaggcuaggugg

SEQ ID NO: 1036 - RNA, 19 nt, Artificial Sequence
  Synthetic oligonucleotide
  hsa-miR-7155-3p MIMAT0028221
uggcccaagaccucagacc

SEQ ID NO: 1037 - RNA, 23 nt, Artificial Sequence
  Synthetic oligonucleotide
  hsa-miR-8087 MIMAT0031014
gaagacuucuuggauuacagggg

SEQ ID NO: 1038 - RNA, 23 nt, Artificial Sequence
  Synthetic oligonucleotide
  hsa-miR-550a-5p MIMAT0004800
agugccugagggaguaagagccc

SEQ ID NO: 1039 - RNA, 22 nt, Artificial Sequence
  Synthetic oligonucleotide
  hsa-miR-6510-5p MIMAT0025476
cagcaggggagagagaggaguc

SEQ ID NO: 1040 - RNA, 23 nt, Artificial Sequence
  Synthetic oligonucleotide
  hsa-miR-3605-5p MIMAT0017981
ugaggauggauagcaaggaagcc

SEQ ID NO: 1041 - RNA, 20 nt, Artificial Sequence
  Synthetic oligonucleotide
  hsa-miR-1268b MIMAT0018925
cgggcgugguggugggggug

SEQ ID NO: 1042 - RNA, 19 nt, Artificial Sequence
  Synthetic oligonucleotide
  hsa-miR-6129 MIMAT0024613
ugagggaguuggguguaua

SEQ ID NO: 1043 - RNA, 22 nt, Artificial Sequence
  Synthetic oligonucleotide
  hsa-miR-6857-5p MIMAT0027614
uuggggauugggucaggccagu

SEQ ID NO: 1044 - RNA, 23 nt, Artificial Sequence
  Synthetic oligonucleotide
  hsa-miR-215-3p MIMAT0026476
ucugucauuucuuuaggccaaua

SEQ ID NO: 1045 - RNA, 22 nt, Artificial Sequence
  Synthetic oligonucleotide
  hsa-miR-30b-3p MIMAT0004589
cugggagguggauguuuacuuc

SEQ ID NO: 1046 - RNA, 21 nt, Artificial Sequence
  Synthetic oligonucleotide
  hsa-miR-4687-3p MIMAT0019775
uggcuguuggagggggcaggc

SEQ ID NO: 1047 - RNA, 22 nt, Artificial Sequence
  Synthetic oligonucleotide
  hsa-miR-4794 MIMAT0019967
ucuggcuaucucacgagacugu

SEQ ID NO: 1048 - RNA, 20 nt, Artificial Sequence
  Synthetic oligonucleotide
  hsa-miR-6727-3p MIMAT0027356
uccugccaccuccuccgcag

SEQ ID NO: 1049 - RNA, 23 nt, Artificial Sequence
  Synthetic oligonucleotide
  hsa-miR-516a-5p MIMAT0004770
uucucgaggaaagaagcacuuuc

SEQ ID NO: 1050 - RNA, 24 nt, Artificial Sequence
  Synthetic oligonucleotide
  hsa-miR-6806-5p MIMAT0027512
uguaggcaugaggcagggcccagg

SEQ ID NO: 1051 - RNA, 23 nt, Artificial Sequence
  Synthetic oligonucleotide
  hsa-miR-29b-3p MIMAT0000100
uagcaccauuugaaaucaguguu

SEQ ID NO: 1052 - RNA, 22 nt, Artificial Sequence
  Synthetic oligonucleotide
  hsa-miR-4713-3p MIMAT0019821
ugggauccagacagugggagaa

SEQ ID NO: 1053 - RNA, 22 nt, Artificial Sequence
  Synthetic oligonucleotide
  hsa-miR-6755-3p MIMAT0027411
uguugucauguuuuuucccuag

SEQ ID NO: 1054 - RNA, 21 nt, Artificial Sequence
  Synthetic oligonucleotide
  hsa-miR-4433b-5p MIMAT0030413
augucccacccccacuccugu

SEQ ID NO: 1055 - RNA, 22 nt, Artificial Sequence
  Synthetic oligonucleotide
  hsa-miR-4659b-3p MIMAT0019734
uuucuucuuagacauggcagcu

SEQ ID NO: 1056 - RNA, 22 nt, Artificial Sequence
  Synthetic oligonucleotide
  hsa-miR-8052 MIMAT0030979
cgggacuguagagggcaugagc

SEQ ID NO: 1057 - RNA, 23 nt, Artificial Sequence
  Synthetic oligonucleotide
  hsa-miR-6513-5p MIMAT0025482
uuugggauugacgccacaugucu

SEQ ID NO: 1058 - RNA, 20 nt, Artificial Sequence
  Synthetic oligonucleotide
  hsa-miR-6872-5p MIMAT0027644
ucucgcaucaggaggcaagg

SEQ ID NO: 1059 - RNA, 21 nt, Artificial Sequence
  Synthetic oligonucleotide
  hsa-miR-5011-5p MIMAT0021045
uauauauacagccaugcacuc

SEQ ID NO: 1060 - RNA, 21 nt, Artificial Sequence
  Synthetic oligonucleotide
  hsa-miR-431-5p MIMAT0001625
ugucuugcaggccgucaugca

SEQ ID NO: 1061 - RNA, 24 nt, Artificial Sequence
  Synthetic oligonucleotide
  hsa-miR-7974 MIMAT0031177
aggcugugaugcucuccugagccc

SEQ ID NO: 1062 - RNA, 23 nt, Artificial Sequence
  Synthetic oligonucleotide
  hsa-miR-6768-5p MIMAT0027436
cacacaggaaaagcggggcccug

SEQ ID NO: 1063 - RNA, 22 nt, Artificial Sequence
  Synthetic oligonucleotide
  hsa-miR-6516-3p MIMAT0030418
aucauguaugauacugcaaaca

SEQ ID NO: 1064 - RNA, 22 nt, Artificial Sequence
  Synthetic oligonucleotide
  hsa-miR-200b-3p MIMAT0000318
uaauacugccugguaaugauga

SEQ ID NO: 1065 - RNA, 21 nt, Artificial Sequence
  Synthetic oligonucleotide
  hsa-miR-548ar-5p MIMAT0022265
aaaaguaauugcaguuuuugc

SEQ ID NO: 1066 - RNA, 17 nt, Artificial Sequence
  Synthetic oligonucleotide
  hsa-miR-3201 MIMAT0015086
gggauaugaagaaaaau

SEQ ID NO: 1067 - RNA, 24 nt, Artificial Sequence
  Synthetic oligonucleotide
  hsa-miR-1249-5p MIMAT0032029
aggagggaggagaugggccaaguu

SEQ ID NO: 1068 - RNA, 22 nt, Artificial Sequence
  Synthetic oligonucleotide
  hsa-miR-6499-5p MIMAT0025450
ucgggcgcaagagcacugcagu

SEQ ID NO: 1069 - RNA, 22 nt, Artificial Sequence
  Synthetic oligonucleotide
  hsa-miR-1305 MIMAT0005893
uuuucaacucuaaugggagaga

SEQ ID NO: 1070 - RNA, 22 nt, Artificial Sequence
  Synthetic oligonucleotide
  hsa-miR-937-3p MIMAT0004980
auccgcgcucugacucucugcc

SEQ ID NO: 1071 - RNA, 21 nt, Artificial Sequence
  Synthetic oligonucleotide
  hsa-miR-432-3p MIMAT0002815
cuggauggcuccuccaugucu

SEQ ID NO: 1072 - RNA, 22 nt, Artificial Sequence
  Synthetic oligonucleotide
  hsa-miR-6870-3p MIMAT0027641
gcucauccccaucuccuuucag

SEQ ID NO: 1073 - RNA, 21 nt, Artificial Sequence
  Synthetic oligonucleotide
  hsa-miR-6510-3p MIMAT0025477
caccgacucugucuccugcag

SEQ ID NO: 1074 - RNA, 21 nt, Artificial Sequence
  Synthetic oligonucleotide
  hsa-miR-3660 MIMAT0018081
acugacaggagagcauuuuga

SEQ ID NO: 1075 - RNA, 20 nt, Artificial Sequence
  Synthetic oligonucleotide
  hsa-miR-550b-3p MIMAT0018445
ucuuacucccucaggcacug

SEQ ID NO: 1076 - RNA, 21 nt, Artificial Sequence
  Synthetic oligonucleotide
  hsa-miR-606 MIMAT0003274
aaacuacugaaaaucaaagau

SEQ ID NO: 1077 - RNA, 19 nt, Artificial Sequence
  Synthetic oligonucleotide
  hsa-miR-3180 MIMAT0018178
uggggcggagcuuccggag

SEQ ID NO: 1078 - RNA, 23 nt, Artificial Sequence
  Synthetic oligonucleotide
  hsa-miR-421 MIMAT0003339
aucaacagacauuaauugggcgc

SEQ ID NO: 1079 - RNA, 22 nt, Artificial Sequence
  Synthetic oligonucleotide
  hsa-miR-519e-3p MIMAT0002829
aagugccuccuuuuagaguguu

SEQ ID NO: 1080 - RNA, 21 nt, Artificial Sequence
  Synthetic oligonucleotide
  hsa-miR-151a-5p MIMAT0004697
ucgaggagcucacagucuagu

SEQ ID NO: 1081 - RNA, 20 nt, Artificial Sequence
  Synthetic oligonucleotide
  hsa-miR-378g MIMAT0018937
acugggcuuggagucagaag

SEQ ID NO: 1082 - RNA, 22 nt, Artificial Sequence
  Synthetic oligonucleotide
  hsa-miR-29a-5p MIMAT0004503
acugauuucuuuugguguucag

SEQ ID NO: 1083 - RNA, 21 nt, Artificial Sequence
  Synthetic oligonucleotide
  hsa-miR-6891-3p MIMAT0027683
cccucaucuuccccuccuuuc

SEQ ID NO: 1084 - RNA, 21 nt, Artificial Sequence
  Synthetic oligonucleotide
  hsa-miR-6894-3p MIMAT0027689
uugccugcccucuuccuccag

SEQ ID NO: 1085 - RNA, 22 nt, Artificial Sequence
  Synthetic oligonucleotide
  hsa-miR-521 MIMAT0002854
aacgcacuucccuuuagagugu

SEQ ID NO: 1086 - RNA, 23 nt, Artificial Sequence
  Synthetic oligonucleotide
  hsa-miR-518c-5p MIMAT0002847
ucucuggagggaagcacuuucug

SEQ ID NO: 1087 - RNA, 19 nt, Artificial Sequence
  Synthetic oligonucleotide
  hsa-miR-646 MIMAT0003316
aagcagcugccucugaggc

SEQ ID NO: 1088 - RNA, 22 nt, Artificial Sequence
  Synthetic oligonucleotide
  hsa-miR-4788 MIMAT0019958
uuacggaccagcuaagggaggc

SEQ ID NO: 1089 - RNA, 22 nt, Artificial Sequence
  Synthetic oligonucleotide
  hsa-miR-590-5p MIMAT0003258
gagcuuauucauaaaagugcag

SEQ ID NO: 1090 - RNA, 17 nt, Artificial Sequence
  Synthetic oligonucleotide
  hsa-miR-4483 MIMAT0019017
gggguggucuguuguug

SEQ ID NO: 1091 - RNA, 17 nt, Artificial Sequence
  Synthetic oligonucleotide
  hsa-miR-1281 MIMAT0005939
ucgccuccuccucuccc

SEQ ID NO: 1092 - RNA, 22 nt, Artificial Sequence
  Synthetic oligonucleotide
  hsa-miR-5192 MIMAT0021123
aggagaguggauuccagguggu

SEQ ID NO: 1093 - RNA, 21 nt, Artificial Sequence
  Synthetic oligonucleotide
  hsa-miR-3657 MIMAT0018077
ugugucccauuauuggugauu

SEQ ID NO: 1094 - RNA, 22 nt, Artificial Sequence
  Synthetic oligonucleotide
  hsa-miR-148a-3p MIMAT0000243
ucagugcacuacagaacuuugu

SEQ ID NO: 1095 - RNA, 23 nt, Artificial Sequence
  Synthetic oligonucleotide
  hsa-miR-4691-5p MIMAT0019781
guccuccaggccaugagcugcgg

SEQ ID NO: 1096 - RNA, 21 nt, Artificial Sequence
  Synthetic oligonucleotide
  hsa-miR-3151-5p MIMAT0015024
gguggggcaaugggaucaggu

SEQ ID NO: 1097 - RNA, 21 nt, Artificial Sequence
  Synthetic oligonucleotide
  hsa-miR-8054 MIMAT0030981
gaaaguacagaucggaugggu

SEQ ID NO: 1098 - RNA, 22 nt, Artificial Sequence
  Synthetic oligonucleotide
  hsa-miR-4482-3p MIMAT0020958
uuucuauuucucaguggggcuc

SEQ ID NO: 1099 - RNA, 23 nt, Artificial Sequence
  Synthetic oligonucleotide
  hsa-miR-412-5p MIMAT0026557
uggucgaccaguuggaaaguaau

SEQ ID NO: 1100 - RNA, 21 nt, Artificial Sequence
  Synthetic oligonucleotide
  hsa-miR-6851-3p MIMAT0027603
uggcccuuuguaccccuccag

SEQ ID NO: 1101 - RNA, 22 nt, Artificial Sequence
  Synthetic oligonucleotide
  hsa-miR-6502-5p MIMAT0025460
agcucuagaaagauuguugacc

SEQ ID NO: 1102 - RNA, 21 nt, Artificial Sequence
  Synthetic oligonucleotide
  hsa-miR-2113 MIMAT0009206
auuugugcuuggcucugucac

SEQ ID NO: 1103 - RNA, 22 nt, Artificial Sequence
  Synthetic oligonucleotide
  hsa-miR-570-3p MIMAT0003235
cgaaaacagcaauuaccuuugc

SEQ ID NO: 1104 - RNA, 21 nt, Artificial Sequence
  Synthetic oligonucleotide
  hsa-miR-6736-3p MIMAT0027374
ucagcuccucucuacccacag

SEQ ID NO: 1105 - RNA, 23 nt, Artificial Sequence
  Synthetic oligonucleotide
  hsa-miR-4757-5p MIMAT0019901
aggccucugugacgucacggugu

SEQ ID NO: 1106 - RNA, 22 nt, Artificial Sequence
  Synthetic oligonucleotide
  hsa-miR-3135a MIMAT0015001
ugccuaggcugagacugcagug

SEQ ID NO: 1107 - RNA, 20 nt, Artificial Sequence
  Synthetic oligonucleotide
  hsa-miR-324-3p MIMAT0000762
acugccccaggugcugcugg

SEQ ID NO: 1108 - RNA, 21 nt, Artificial Sequence
  Synthetic oligonucleotide
  hsa-miR-622 MIMAT0003291
acagucugcugagguuggagc

SEQ ID NO: 1109 - RNA, 19 nt, Artificial Sequence
  Synthetic oligonucleotide
  hsa-miR-5571-3p MIMAT0022258
guccuaggaggcuccucug

SEQ ID NO: 1110 - RNA, 21 nt, Artificial Sequence
  Synthetic oligonucleotide
  hsa-miR-581 MIMAT0003246
ucuuguguucucuagaucagu

SEQ ID NO: 1111 - RNA, 23 nt, Artificial Sequence
  Synthetic oligonucleotide
  hsa-miR-7156-3p MIMAT0028223
cugcagccacuuggggaacuggu

SEQ ID NO: 1112 - RNA, 24 nt, Artificial Sequence
  Synthetic oligonucleotide
  hsa-miR-520g-3p MIMAT0002858
acaaagugcuucccuuuagagugu

SEQ ID NO: 1113 - RNA, 18 nt, Artificial Sequence
  Synthetic oligonucleotide
  hsa-miR-1207-3p MIMAT0005872
ucagcuggcccucauuuc

SEQ ID NO: 1114 - RNA, 21 nt, Artificial Sequence
  Synthetic oligonucleotide
  hsa-miR-506-3p MIMAT0002878
uaaggcacccuucugaguaga

SEQ ID NO: 1115 - RNA, 22 nt, Artificial Sequence
  Synthetic oligonucleotide
  hsa-miR-6811-5p MIMAT0027522
augcaggccuguguacagcacu

SEQ ID NO: 1116 - RNA, 25 nt, Artificial Sequence
  Synthetic oligonucleotide
  hsa-miR-6775-5p MIMAT0027450
ucggggcaugggggagggaggcugg

SEQ ID NO: 1117 - RNA, 22 nt, Artificial Sequence
  Synthetic oligonucleotide
  hsa-miR-6748-5p MIMAT0027396
ugugggugggaaggacuggauu

SEQ ID NO: 1118 - RNA, 22 nt, Artificial Sequence
  Synthetic oligonucleotide
  hsa-miR-1273h-3p MIMAT0030416
cugcagacucgaccucccaggc

SEQ ID NO: 1119 - RNA, 22 nt, Artificial Sequence
  Synthetic oligonucleotide
  hsa-miR-31-3p MIMAT0004504
ugcuaugccaacauauugccau

SEQ ID NO: 1120 - RNA, 21 nt, Artificial Sequence
  Synthetic oligonucleotide
  hsa-miR-676-5p MIMAT0018203
ucuucaaccucaggacuugca

SEQ ID NO: 1121 - RNA, 22 nt, Artificial Sequence
  Synthetic oligonucleotide
  hsa-miR-2115-3p MIMAT0011159
caucagaauucauggaggcuag

SEQ ID NO: 1122 - RNA, 22 nt, Artificial Sequence
  Synthetic oligonucleotide
  hsa-miR-7152-5p MIMAT0028214
uuuccuguccuccaaccagacc

SEQ ID NO: 1123 - RNA, 22 nt, Artificial Sequence
  Synthetic oligonucleotide
  hsa-miR-4460 MIMAT0018982
auagugguugugaauuuaccuu

SEQ ID NO: 1124 - RNA, 22 nt, Artificial Sequence
  Synthetic oligonucleotide
  hsa-miR-5681a MIMAT0022469
agaaaggguggcaauaccucuu

SEQ ID NO: 1125 - RNA, 23 nt, Artificial Sequence
  Synthetic oligonucleotide
  hsa-miR-3974 MIMAT0019359
aaaggucauuguaagguuaaugc

SEQ ID NO: 1126 - RNA, 20 nt, Artificial Sequence
  Synthetic oligonucleotide
  hsa-miR-6083 MIMAT0023708
cuuauaucagaggcuguggg

SEQ ID NO: 1127 - RNA, 23 nt, Artificial Sequence
  Synthetic oligonucleotide
  hsa-miR-7156-5p MIMAT0028222
uuguucucaaacuggcugucaga

SEQ ID NO: 1128 - RNA, 22 nt, Artificial Sequence
  Synthetic oligonucleotide
  hsa-miR-6802-3p MIMAT0027505
uucaccccucucaccuaagcag

SEQ ID NO: 1129 - RNA, 23 nt, Artificial Sequence
  Synthetic oligonucleotide
  hsa-miR-6780a-5p MIMAT0027460
uugggagggaagacagcuggaga

SEQ ID NO: 1130 - RNA, 22 nt, Artificial Sequence
  Synthetic oligonucleotide
  hsa-miR-484 MIMAT0002174
ucaggcucaguccccucccgau

SEQ ID NO: 1131 - RNA, 24 nt, Artificial Sequence
  Synthetic oligonucleotide
  hsa-miR-6770-5p MIMAT0027440
ugagaaggcacagcuugcacguga

SEQ ID NO: 1132 - RNA, 21 nt, Artificial Sequence
  Synthetic oligonucleotide
  hsa-miR-382-3p MIMAT0022697
aaucauucacggacaacacuu

SEQ ID NO: 1133 - RNA, 22 nt, Artificial Sequence
  Synthetic oligonucleotide
  hsa-miR-4752 MIMAT0019889
uuguggaucucaaggaugugcu

SEQ ID NO: 1134 - RNA, 22 nt, Artificial Sequence
  Synthetic oligonucleotide
  hsa-miR-4701-5p MIMAT0019798
uuggccaccacaccuaccccuu

SEQ ID NO: 1135 - RNA, 23 nt, Artificial Sequence
  Synthetic oligonucleotide
  hsa-miR-6848-5p MIMAT0027596
ugggggcugggaugggccauggu

SEQ ID NO: 1136 - RNA, 23 nt, Artificial Sequence
  Synthetic oligonucleotide
  hsa-miR-6724-5p MIMAT0025856
cugggcccgcggcgggcgugggg

SEQ ID NO: 1137 - RNA, 20 nt, Artificial Sequence
  Synthetic oligonucleotide
  hsa-miR-124-3p MIMAT0000422
uaaggcacgcggugaaugcc

SEQ ID NO: 1138 - RNA, 22 nt, Artificial Sequence
  Synthetic oligonucleotide
  hsa-miR-3923 MIMAT0018198
aacuaguaauguuggauuaggg

SEQ ID NO: 1139 - RNA, 21 nt, Artificial Sequence
  Synthetic oligonucleotide
  hsa-miR-4422 MIMAT0018935
aaaagcaucaggaaguaccca

SEQ ID NO: 1140 - RNA, 22 nt, Artificial Sequence
  Synthetic oligonucleotide
  hsa-miR-96-3p MIMAT0004510
aaucaugugcagugccaauaug

SEQ ID NO: 1141 - RNA, 17 nt, Artificial Sequence
  Synthetic oligonucleotide
  hsa-miR-4441 MIMAT0018959
acagggaggagauugua

SEQ ID NO: 1142 - RNA, 17 nt, Artificial Sequence
  Synthetic oligonucleotide
  hsa-miR-4535 MIMAT0019075
guggaccuggcugggac

SEQ ID NO: 1143 - RNA, 21 nt, Artificial Sequence
  Synthetic oligonucleotide
  hsa-miR-6831-3p MIMAT0027563
ugacuaacucccacucuacag

SEQ ID NO: 1144 - RNA, 21 nt, Artificial Sequence
  Synthetic oligonucleotide
  hsa-miR-4676-5p MIMAT0019758
gagccaguggugagacaguga

SEQ ID NO: 1145 - RNA, 24 nt, Artificial Sequence
  Synthetic oligonucleotide
  hsa-miR-1324 MIMAT0005956
ccagacagaauucuaugcacuuuc

SEQ ID NO: 1146 - RNA, 19 nt, Artificial Sequence
  Synthetic oligonucleotide
  hsa-miR-320d MIMAT0006764
aaaagcuggguugagagga

SEQ ID NO: 1147 - RNA, 23 nt, Artificial Sequence
  Synthetic oligonucleotide
  hsa-miR-526b-5p MIMAT0002835
cucuugagggaagcacuuucugu

SEQ ID NO: 1148 - RNA, 22 nt, Artificial Sequence
  Synthetic oligonucleotide
  hsa-miR-3620-5p MIMAT0022967
gugggcugggcugggcugggcc

SEQ ID NO: 1149 - RNA, 21 nt, Artificial Sequence
  Synthetic oligonucleotide
  hsa-miR-3926 MIMAT0018201
uggccaaaaagcaggcagaga

SEQ ID NO: 1150 - RNA, 22 nt, Artificial Sequence
  Synthetic oligonucleotide
  hsa-miR-95-3p MIMAT0000094
uucaacggguauuuauugagca

SEQ ID NO: 1151 - RNA, 22 nt, Artificial Sequence
  Synthetic oligonucleotide
  hsa-miR-4688 MIMAT0019777
uaggggcagcagaggaccuggg

SEQ ID NO: 1152 - RNA, 21 nt, Artificial Sequence
  Synthetic oligonucleotide
  hsa-miR-222-3p MIMAT0000279
agcuacaucuggcuacugggu

SEQ ID NO: 1153 - RNA, 22 nt, Artificial Sequence
  Synthetic oligonucleotide
  hsa-miR-617 MIMAT0003286
agacuucccauuugaagguggc

SEQ ID NO: 1154 - RNA, 21 nt, Artificial Sequence
  Synthetic oligonucleotide
  hsa-miR-6865-3p MIMAT0027631
acacccucuuucccuaccgcc

SEQ ID NO: 1155 - RNA, 18 nt, Artificial Sequence
  Synthetic oligonucleotide
  hsa-miR-4285 MIMAT0016913
gcggcgaguccgacucau

SEQ ID NO: 1156 - RNA, 21 nt, Artificial Sequence
  Synthetic oligonucleotide
  hsa-miR-1178-3p MIMAT0005823
uugcucacuguucuucccuag

SEQ ID NO: 1157 - RNA, 22 nt, Artificial Sequence
  Synthetic oligonucleotide
  hsa-miR-4796-5p MIMAT0019970
ugucuauacucugucacuuuac

SEQ ID NO: 1158 - RNA, 17 nt, Artificial Sequence
  Synthetic oligonucleotide
  hsa-miR-1297 MIMAT0005886
uucaaguaauucaggug

SEQ ID NO: 1159 - RNA, 22 nt, Artificial Sequence
  Synthetic oligonucleotide
  hsa-miR-7852-3p MIMAT0030427
uauguaguagucaaaggcauuu

SEQ ID NO: 1160 - RNA, 20 nt, Artificial Sequence
  Synthetic oligonucleotide
  hsa-miR-1208 MIMAT0005873
ucacuguucagacaggcgga

SEQ ID NO: 1161 - RNA, 21 nt, Artificial Sequence
  Synthetic oligonucleotide
  hsa-miR-4522 MIMAT0019060
ugacucugccuguaggccggu

SEQ ID NO: 1162 - RNA, 22 nt, Artificial Sequence
  Synthetic oligonucleotide
  hsa-miR-34c-3p MIMAT0004677
aaucacuaaccacacggccagg

SEQ ID NO: 1163 - RNA, 22 nt, Artificial Sequence
  Synthetic oligonucleotide
  hsa-miR-6784-3p MIMAT0027469
ucucaccccaacucugccccag

SEQ ID NO: 1164 - RNA, 23 nt, Artificial Sequence
  Synthetic oligonucleotide
  hsa-miR-767-3p MIMAT0003883
ucugcucauaccccaugguuucu

SEQ ID NO: 1165 - RNA, 22 nt, Artificial Sequence
  Synthetic oligonucleotide
  hsa-miR-6771-5p MIMAT0027442
cucgggagggcaugggccaggc

SEQ ID NO: 1166 - RNA, 22 nt, Artificial Sequence
  Synthetic oligonucleotide
  hsa-miR-6875-3p MIMAT0027651
auucuuccugcccuggcuccau

SEQ ID NO: 1167 - RNA, 21 nt, Artificial Sequence
  Synthetic oligonucleotide
  hsa-miR-1253 MIMAT0005904
agagaagaagaucagccugca

SEQ ID NO: 1168 - RNA, 21 nt, Artificial Sequence
  Synthetic oligonucleotide
  hsa-miR-4764-5p MIMAT0019914
uggauguggaaggaguuaucu

SEQ ID NO: 1169 - RNA, 21 nt, Artificial Sequence
  Synthetic oligonucleotide
  hsa-miR-6789-3p MIMAT0027479
cggcgcccgugucuccuccag

SEQ ID NO: 1170 - RNA, 23 nt, Artificial Sequence
  Synthetic oligonucleotide
  hsa-miR-134-3p MIMAT0026481
ccugugggccaccuagucaccaa

SEQ ID NO: 1171 - RNA, 22 nt, Artificial Sequence
  Synthetic oligonucleotide
  hsa-miR-936 MIMAT0004979
acaguagagggaggaaucgcag

SEQ ID NO: 1172 - RNA, 25 nt, Artificial Sequence
  Synthetic oligonucleotide
  hsa-miR-921 MIMAT0004971
cuagugagggacagaaccaggauuc

SEQ ID NO: 1173 - RNA, 22 nt, Artificial Sequence
  Synthetic oligonucleotide
  hsa-miR-193a-3p MIMAT0000459
aacuggccuacaaagucccagu

SEQ ID NO: 1174 - RNA, 21 nt, Artificial Sequence
  Synthetic oligonucleotide
  hsa-miR-1185-5p MIMAT0005798
agaggauacccuuuguauguu

SEQ ID NO: 1175 - RNA, 23 nt, Artificial Sequence
  Synthetic oligonucleotide
  hsa-miR-6847-5p MIMAT0027594
acagaggacaguggagugugagc

SEQ ID NO: 1176 - RNA, 20 nt, Artificial Sequence
  Synthetic oligonucleotide
  hsa-miR-1199-5p MIMAT0031119
ccugagcccgggccgcgcag

SEQ ID NO: 1177 - RNA, 21 nt, Artificial Sequence
  Synthetic oligonucleotide
  hsa-miR-4655-3p MIMAT0019722
acccucgucagguccccgggg

SEQ ID NO: 1178 - RNA, 21 nt, Artificial Sequence
  Synthetic oligonucleotide
  hsa-miR-6833-3p MIMAT0027567
uuucucucuccacuuccucag

SEQ ID NO: 1179 - RNA, 22 nt, Artificial Sequence
  Synthetic oligonucleotide
  hsa-miR-1277-3p MIMAT0005933
uacguagauauauauguauuuu

SEQ ID NO: 1180 - RNA, 23 nt, Artificial Sequence
  Synthetic oligonucleotide
  hsa-miR-4776-3p MIMAT0019933
cuugccauccugguccacugcau

SEQ ID NO: 1181 - RNA, 23 nt, Artificial Sequence
  Synthetic oligonucleotide
  hsa-miR-1538 MIMAT0007400
cggcccgggcugcugcuguuccu

SEQ ID NO: 1182 - RNA, 22 nt, Artificial Sequence
  Synthetic oligonucleotide
  hsa-miR-3116 MIMAT0014978
ugccuggaacauaguagggacu

SEQ ID NO: 1183 - RNA, 22 nt, Artificial Sequence
  Synthetic oligonucleotide
  hsa-miR-208a-3p MIMAT0000241
auaagacgagcaaaaagcuugu

SEQ ID NO: 1184 - RNA, 22 nt, Artificial Sequence
  Synthetic oligonucleotide
  hsa-miR-30c-2-3p MIMAT0004550
cugggagaaggcuguuuacucu

SEQ ID NO: 1185 - RNA, 22 nt, Artificial Sequence
  Synthetic oligonucleotide
  hsa-miR-30e-3p MIMAT0000693
cuuucagucggauguuuacagc

SEQ ID NO: 1186 - RNA, 23 nt, Artificial Sequence
  Synthetic oligonucleotide
  hsa-miR-149-5p MIMAT0000450
ucuggcuccgugucuucacuccc

SEQ ID NO: 1187 - RNA, 22 nt, Artificial Sequence
  Synthetic oligonucleotide
  hsa-miR-4646-5p MIMAT0019707
acugggaagaggagcugaggga

SEQ ID NO: 1188 - RNA, 22 nt, Artificial Sequence
  Synthetic oligonucleotide
  hsa-miR-3198 MIMAT0015083
guggaguccuggggaauggaga

SEQ ID NO: 1189 - RNA, 23 nt, Artificial Sequence
  Synthetic oligonucleotide
  hsa-miR-221-3p MIMAT0000278
agcuacauugucugcuggguuuc

SEQ ID NO: 1190 - RNA, 23 nt, Artificial Sequence
  Synthetic oligonucleotide
  hsa-miR-3139 MIMAT0015007
uaggagcucaacagaugccuguu

SEQ ID NO: 1191 - RNA, 22 nt, Artificial Sequence
  Synthetic oligonucleotide
  hsa-miR-520f-5p MIMAT0026609
ccucuaaagggaagcgcuuucu

SEQ ID NO: 1192 - RNA, 21 nt, Artificial Sequence
  Synthetic oligonucleotide
  hsa-miR-4999-5p MIMAT0021017
ugcuguauugucagguaguga

SEQ ID NO: 1193 - RNA, 22 nt, Artificial Sequence
  Synthetic oligonucleotide
  hsa-miR-20b-3p MIMAT0004752
acuguaguaugggcacuuccag

SEQ ID NO: 1194 - RNA, 23 nt, Artificial Sequence
  Synthetic oligonucleotide
  hsa-miR-5188 MIMAT0021119
aaucggacccauuuaaaccggag

SEQ ID NO: 1195 - RNA, 21 nt, Artificial Sequence
  Synthetic oligonucleotide
  hsa-miR-652-3p MIMAT0003322
aauggcgccacuaggguugug

SEQ ID NO: 1196 - RNA, 20 nt, Artificial Sequence
  Synthetic oligonucleotide
  hsa-miR-4737 MIMAT0019863
augcgaggaugcugacagug

SEQ ID NO: 1197 - RNA, 17 nt, Artificial Sequence
  Synthetic oligonucleotide
  hsa-miR-3656 MIMAT0018076
ggcgggugcgggggugg

SEQ ID NO: 1198 - RNA, 23 nt, Artificial Sequence
  Synthetic oligonucleotide
  hsa-miR-498 MIMAT0002824
uuucaagccagggggcguuuuuc

SEQ ID NO: 1199 - RNA, 22 nt, Artificial Sequence
  Synthetic oligonucleotide
  hsa-miR-4734 MIMAT0019859
gcugcgggcugcggucagggcg

SEQ ID NO: 1200 - RNA, 22 nt, Artificial Sequence
  Synthetic oligonucleotide
  hsa-miR-1469 MIMAT0007347
cucggcgcggggcgcgggcucc

SEQ ID NO: 1201 - RNA, 22 nt, Artificial Sequence
  Synthetic oligonucleotide
  hsa-miR-4490 MIMAT0019025
ucugguaagagauuugggcaua

SEQ ID NO: 1202 - RNA, 19 nt, Artificial Sequence
  Synthetic oligonucleotide
  hsa-miR-4260 MIMAT0016881
cuuggggcauggaguccca

SEQ ID NO: 1203 - RNA, 22 nt, Artificial Sequence
  Synthetic oligonucleotide
  hsa-miR-2115-5p MIMAT0011158
agcuuccaugacuccugaugga

SEQ ID NO: 1204 - RNA, 22 nt, Artificial Sequence
  Synthetic oligonucleotide
  hsa-miR-5681b MIMAT0022480
agguauugccacccuuucuagu

SEQ ID NO: 1205 - RNA, 22 nt, Artificial Sequence
  Synthetic oligonucleotide
  hsa-miR-4662a-5p MIMAT0019731
uuagccaauuguccaucuuuag

SEQ ID NO: 1206 - RNA, 23 nt, Artificial Sequence
  Synthetic oligonucleotide
  hsa-miR-633 MIMAT0003303
cuaauaguaucuaccacaauaaa

SEQ ID NO: 1207 - RNA, 20 nt, Artificial Sequence
  Synthetic oligonucleotide
  hsa-miR-6084 MIMAT0023709
uuccgccagucgguggccgg

SEQ ID NO: 1208 - RNA, 22 nt, Artificial Sequence
  Synthetic oligonucleotide
  hsa-miR-4471 MIMAT0018998
ugggaacuuaguagagguuuaa

SEQ ID NO: 1209 - RNA, 21 nt, Artificial Sequence
  Synthetic oligonucleotide
  hsa-miR-212-3p MIMAT0000269
uaacagucuccagucacggcc

SEQ ID NO: 1210 - RNA, 22 nt, Artificial Sequence
  Synthetic oligonucleotide
  hsa-miR-585-5p MIMAT0026618
cuagcacacagauacgcccaga

SEQ ID NO: 1211 - RNA, 19 nt, Artificial Sequence
  Synthetic oligonucleotide
  hsa-miR-1224-5p MIMAT0005458
gugaggacucgggaggugg

SEQ ID NO: 1212 - RNA, 22 nt, Artificial Sequence
  Synthetic oligonucleotide
  hsa-miR-4772-5p MIMAT0019926
ugaucaggcaaaauugcagacu

SEQ ID NO: 1213 - RNA, 21 nt, Artificial Sequence
  Synthetic oligonucleotide
  hsa-miR-6764-3p MIMAT0027429
ucucuggucuuuccuugacag

SEQ ID NO: 1214 - RNA, 22 nt, Artificial Sequence
  Synthetic oligonucleotide
  hsa-miR-3158-3p MIMAT0015032
aagggcuuccucucugcaggac

SEQ ID NO: 1215 - RNA, 21 nt, Artificial Sequence
  Synthetic oligonucleotide
  hsa-miR-4427 MIMAT0018942
ucugaauagagucugaagagu

SEQ ID NO: 1216 - RNA, 22 nt, Artificial Sequence
  Synthetic oligonucleotide
  hsa-miR-3913-5p MIMAT0018187
uuugggacugaucuugaugucu

SEQ ID NO: 1217 - RNA, 21 nt, Artificial Sequence
  Synthetic oligonucleotide
  hsa-miR-553 MIMAT0003216
aaaacggugagauuuuguuuu

SEQ ID NO: 1218 - RNA, 22 nt, Artificial Sequence
  Synthetic oligonucleotide
  hsa-miR-6740-3p MIMAT0027382
ugucuucucuccucccaaacag

SEQ ID NO: 1219 - RNA, 20 nt, Artificial Sequence
  Synthetic oligonucleotide
  hsa-miR-568 MIMAT0003232
auguauaaauguauacacac

SEQ ID NO: 1220 - RNA, 22 nt, Artificial Sequence
  Synthetic oligonucleotide
  hsa-miR-3714 MIMAT0018165
gaaggcagcagugcuccccugu

SEQ ID NO: 1221 - RNA, 22 nt, Artificial Sequence
  Synthetic oligonucleotide
  hsa-miR-592 MIMAT0003260
uugugucaauaugcgaugaugu

SEQ ID NO: 1222 - RNA, 22 nt, Artificial Sequence
  Synthetic oligonucleotide
  hsa-miR-6741-5p MIMAT0027383
gugggugcuggugggagccgug

SEQ ID NO: 1223 - RNA, 25 nt, Artificial Sequence
  Synthetic oligonucleotide
  hsa-miR-3189-5p MIMAT0019217
ugccccaucugugcccuggguagga

SEQ ID NO: 1224 - RNA, 22 nt, Artificial Sequence
  Synthetic oligonucleotide
  hsa-miR-3616-5p MIMAT0017995
augaagugcacucaugauaugu

SEQ ID NO: 1225 - RNA, 22 nt, Artificial Sequence
  Synthetic oligonucleotide
  hsa-miR-6753-5p MIMAT0027406
caccagggcagagcagggcuga

SEQ ID NO: 1226 - RNA, 21 nt, Artificial Sequence
  Synthetic oligonucleotide
  hsa-miR-940 MIMAT0004983
aaggcagggcccccgcucccc

SEQ ID NO: 1227 - RNA, 22 nt, Artificial Sequence
  Synthetic oligonucleotide
  hsa-miR-33b-3p MIMAT0004811
cagugccucggcagugcagccc

SEQ ID NO: 1228 - RNA, 23 nt, Artificial Sequence
  Synthetic oligonucleotide
  hsa-miR-4668-3p MIMAT0019746
gaaaauccuuuuuguuuuuccag

SEQ ID NO: 1229 - RNA, 21 nt, Artificial Sequence
  Synthetic oligonucleotide
  hsa-miR-588 MIMAT0003255
uuggccacaauggguuagaac

SEQ ID NO: 1230 - RNA, 21 nt, Artificial Sequence
  Synthetic oligonucleotide
  hsa-miR-1251-5p MIMAT0005903
acucuagcugccaaaggcgcu

SEQ ID NO: 1231 - RNA, 23 nt, Artificial Sequence
  Synthetic oligonucleotide
  hsa-miR-8078 MIMAT0031005
ggucuaggcccggugagagacuc

SEQ ID NO: 1232 - RNA, 18 nt, Artificial Sequence
  Synthetic oligonucleotide
  hsa-miR-5703 MIMAT0022496
aggagaagucgggaaggu

SEQ ID NO: 1233 - RNA, 22 nt, Artificial Sequence
  Synthetic oligonucleotide
  hsa-miR-146a-3p MIMAT0004608
ccucugaaauucaguucuucag

SEQ ID NO: 1234 - RNA, 25 nt, Artificial Sequence
  Synthetic oligonucleotide
  hsa-miR-449c-5p MIMAT0010251
uaggcaguguauugcuagcggcugu

SEQ ID NO: 1235 - RNA, 23 nt, Artificial Sequence
  Synthetic oligonucleotide
  hsa-miR-5087 MIMAT0021079
ggguuuguagcuuugcuggcaug

SEQ ID NO: 1236 - RNA, 21 nt, Artificial Sequence
  Synthetic oligonucleotide
  hsa-miR-6800-3p MIMAT0027501
caccucuccuggcaucgcccc

SEQ ID NO: 1237 - RNA, 22 nt, Artificial Sequence
  Synthetic oligonucleotide
  hsa-miR-3913-3p MIMAT0019225
agacaucaagaucagucccaaa

SEQ ID NO: 1238 - RNA, 22 nt, Artificial Sequence
  Synthetic oligonucleotide
  hsa-miR-6814-3p MIMAT0027529
acucgcauccuucccuuggcag

SEQ ID NO: 1239 - RNA, 20 nt, Artificial Sequence
  Synthetic oligonucleotide
  hsa-miR-1292-3p MIMAT0022948
ucgcgccccggcucccguuc

SEQ ID NO: 1240 - RNA, 22 nt, Artificial Sequence
  Synthetic oligonucleotide
  hsa-miR-6735-3p MIMAT0027372
aggccuguggcuccucccucag

SEQ ID NO: 1241 - RNA, 20 nt, Artificial Sequence
  Synthetic oligonucleotide
  hsa-miR-548av-3p MIMAT0022304
aaaacugcaguuacuuuugc

SEQ ID NO: 1242 - RNA, 19 nt, Artificial Sequence
  Synthetic oligonucleotide
  hsa-miR-5701 MIMAT0022494
uuauugucacguucugauu

SEQ ID NO: 1243 - RNA, 22 nt, Artificial Sequence
  Synthetic oligonucleotide
  hsa-miR-450b-3p MIMAT0004910
uugggaucauuuugcauccaua

SEQ ID NO: 1244 - RNA, 21 nt, Artificial Sequence
  Synthetic oligonucleotide
  hsa-miR-7847-3p MIMAT0030422
cguggaggacgaggaggaggc

SEQ ID NO: 1245 - RNA, 17 nt, Artificial Sequence
  Synthetic oligonucleotide
  hsa-miR-4497 MIMAT0019032
cuccgggacggcugggc

SEQ ID NO: 1246 - RNA, 23 nt, Artificial Sequence
  Synthetic oligonucleotide
  hsa-miR-3187-5p MIMAT0019216
ccugggcagcguguggcugaagg

SEQ ID NO: 1247 - RNA, 19 nt, Artificial Sequence
  Synthetic oligonucleotide
  hsa-miR-6820-5p MIMAT0027540
ugcggcagagcugggguca

SEQ ID NO: 1248 - RNA, 21 nt, Artificial Sequence
  Synthetic oligonucleotide
  hsa-miR-1181 MIMAT0005826
ccgucgccgccacccgagccg

SEQ ID NO: 1249 - RNA, 22 nt, Artificial Sequence
  Synthetic oligonucleotide
  hsa-miR-3121-3p MIMAT0014983
uaaauagaguaggcaaaggaca

SEQ ID NO: 1250 - RNA, 22 nt, Artificial Sequence
  Synthetic oligonucleotide
  hsa-miR-8058 MIMAT0030985
cuggacuuugaucuugccauaa

SEQ ID NO: 1251 - RNA, 22 nt, Artificial Sequence
  Synthetic oligonucleotide
  hsa-miR-452-5p MIMAT0001635
aacuguuugcagaggaaacuga

SEQ ID NO: 1252 - RNA, 22 nt, Artificial Sequence
  Synthetic oligonucleotide
  hsa-miR-642a-5p MIMAT0003312
gucccucuccaaaugugucuug

SEQ ID NO: 1253 - RNA, 21 nt, Artificial Sequence
  Synthetic oligonucleotide
  hsa-miR-1204 MIMAT0005868
ucguggccuggucuccauuau

SEQ ID NO: 1254 - RNA, 22 nt, Artificial Sequence
  Synthetic oligonucleotide
  hsa-miR-6753-3p MIMAT0027407
uggucugucucugcccuggcac

SEQ ID NO: 1255 - RNA, 22 nt, Artificial Sequence
  Synthetic oligonucleotide
  hsa-miR-3156-5p MIMAT0015030
aaagaucuggaagugggagaca

SEQ ID NO: 1256 - RNA, 22 nt, Artificial Sequence
  Synthetic oligonucleotide
  hsa-miR-363-5p MIMAT0003385
cggguggaucacgaugcaauuu

SEQ ID NO: 1257 - RNA, 22 nt, Artificial Sequence
  Synthetic oligonucleotide
  hsa-miR-7851-3p MIMAT0030426
uaccugggagacugagguugga

SEQ ID NO: 1258 - RNA, 22 nt, Artificial Sequence
  Synthetic oligonucleotide
  hsa-miR-3152-3p MIMAT0015025
uguguuagaauaggggcaauaa

SEQ ID NO: 1259 - RNA, 21 nt, Artificial Sequence
  Synthetic oligonucleotide
  hsa-miR-520e MIMAT0002825
aaagugcuuccuuuuugaggg

SEQ ID NO: 1260 - RNA, 21 nt, Artificial Sequence
  Synthetic oligonucleotide
  hsa-miR-607 MIMAT0003275
guucaaauccagaucuauaac

SEQ ID NO: 1261 - RNA, 22 nt, Artificial Sequence
  Synthetic oligonucleotide
  hsa-miR-6783-5p MIMAT0027466
uaggggaaaaguccugauccgg

SEQ ID NO: 1262 - RNA, 22 nt, Artificial Sequence
  Synthetic oligonucleotide
  hsa-miR-520c-5p MIMAT0005455
cucuagagggaagcacuuucug

SEQ ID NO: 1263 - RNA, 21 nt, Artificial Sequence
  Synthetic oligonucleotide
  hsa-miR-4766-5p MIMAT0019917
ucugaaagagcaguugguguu

SEQ ID NO: 1264 - RNA, 22 nt, Artificial Sequence
  Synthetic oligonucleotide
  hsa-miR-580-3p MIMAT0003245
uugagaaugaugaaucauuagg

SEQ ID NO: 1265 - RNA, 22 nt, Artificial Sequence
  Synthetic oligonucleotide
  hsa-miR-4716-3p MIMAT0019827
aagggggaaggaaacauggaga

SEQ ID NO: 1266 - RNA, 22 nt, Artificial Sequence
  Synthetic oligonucleotide
  hsa-miR-6881-5p MIMAT0027662
ugggguaaggauaggaggguca

SEQ ID NO: 1267 - RNA, 21 nt, Artificial Sequence
  Synthetic oligonucleotide
  hsa-miR-25-5p MIMAT0004498
aggcggagacuugggcaauug

SEQ ID NO: 1268 - RNA, 17 nt, Artificial Sequence
  Synthetic oligonucleotide
  hsa-miR-3178 MIMAT0015055
ggggcgcggccggaucg

SEQ ID NO: 1269 - RNA, 22 nt, Artificial Sequence
  Synthetic oligonucleotide
  hsa-miR-548b-3p MIMAT0003254
caagaaccucaguugcuuuugu

SEQ ID NO: 1270 - RNA, 20 nt, Artificial Sequence
  Synthetic oligonucleotide
  hsa-miR-4651 MIMAT0019715
cggggugggugaggucgggc

SEQ ID NO: 1271 - RNA, 22 nt, Artificial Sequence
  Synthetic oligonucleotide
  hsa-miR-4798-5p MIMAT0019974
uucgguauacuuugugaauugg

SEQ ID NO: 1272 - RNA, 22 nt, Artificial Sequence
  Synthetic oligonucleotide
  hsa-miR-148a-5p MIMAT0004549
aaaguucugagacacuccgacu

SEQ ID NO: 1273 - RNA, 22 nt, Artificial Sequence
  Synthetic oligonucleotide
  hsa-miR-4781-3p MIMAT0019943
aauguuggaauccucgcuagag

SEQ ID NO: 1274 - RNA, 22 nt, Artificial Sequence
  Synthetic oligonucleotide
  hsa-miR-4538 MIMAT0019081
gagcuuggaugagcugggcuga

SEQ ID NO: 1275 - RNA, 22 nt, Artificial Sequence
  Synthetic oligonucleotide
  hsa-miR-6722-3p MIMAT0025854
ugcaggggucgggugggccagg

SEQ ID NO: 1276 - RNA, 22 nt, Artificial Sequence
  Synthetic oligonucleotide
  hsa-miR-4716-5p MIMAT0019826
uccauguuuccuucccccuucu

SEQ ID NO: 1277 - RNA, 23 nt, Artificial Sequence
  Synthetic oligonucleotide
  hsa-miR-3973 MIMAT0019358
acaaaguacagcauuagccuuag

SEQ ID NO: 1278 - RNA, 22 nt, Artificial Sequence
  Synthetic oligonucleotide
  hsa-miR-99b-5p MIMAT0000689
cacccguagaaccgaccuugcg

SEQ ID NO: 1279 - RNA, 21 nt, Artificial Sequence
  Synthetic oligonucleotide
  hsa-miR-548au-5p MIMAT0022291
aaaaguaauugcgguuuuugc

SEQ ID NO: 1280 - RNA, 22 nt, Artificial Sequence
  Synthetic oligonucleotide
  hsa-miR-494-3p MIMAT0002816
ugaaacauacacgggaaaccuc

SEQ ID NO: 1281 - RNA, 22 nt, Artificial Sequence
  Synthetic oligonucleotide
  hsa-miR-452-3p MIMAT0001636
cucaucugcaaagaaguaagug

SEQ ID NO: 1282 - RNA, 22 nt, Artificial Sequence
  Synthetic oligonucleotide
  hsa-miR-19b-2-5p MIMAT0004492
aguuuugcagguuugcauuuca

SEQ ID NO: 1283 - RNA, 22 nt, Artificial Sequence
  Synthetic oligonucleotide
  hsa-miR-221-5p MIMAT0004568
accuggcauacaauguagauuu

SEQ ID NO: 1284 - RNA, 21 nt, Artificial Sequence
  Synthetic oligonucleotide
  hsa-miR-4322 MIMAT0016873
cugugggcucagcgcgugggg

SEQ ID NO: 1285 - RNA, 21 nt, Artificial Sequence
  Synthetic oligonucleotide
  hsa-miR-6780a-3p MIMAT0027461
cuccucuguuuucuuuccuag

SEQ ID NO: 1286 - RNA, 19 nt, Artificial Sequence
  Synthetic oligonucleotide
  hsa-miR-4329 MIMAT0016923
ccugagacccuaguuccac

SEQ ID NO: 1287 - RNA, 21 nt, Artificial Sequence
  Synthetic oligonucleotide
  hsa-miR-548at-3p MIMAT0022278
caaaaccgcaguaacuuuugu

SEQ ID NO: 1288 - RNA, 22 nt, Artificial Sequence
  Synthetic oligonucleotide
  hsa-miR-4704-3p MIMAT0019804
ucagucacauaucuagugucua

SEQ ID NO: 1289 - RNA, 22 nt, Artificial Sequence
  Synthetic oligonucleotide
  hsa-miR-3664-3p MIMAT0019220
ucucaggaguaaagacagaguu

SEQ ID NO: 1290 - RNA, 20 nt, Artificial Sequence
  Synthetic oligonucleotide
  hsa-miR-4648 MIMAT0019710
ugugggacugcaaaugggag

SEQ ID NO: 1291 - RNA, 22 nt, Artificial Sequence
  Synthetic oligonucleotide
  hsa-let-7f-2-3p MIMAT0004487
cuauacagucuacugucuuucc

SEQ ID NO: 1292 - RNA, 21 nt, Artificial Sequence
  Synthetic oligonucleotide
  hsa-miR-551a MIMAT0003214
gcgacccacucuugguuucca

SEQ ID NO: 1293 - RNA, 22 nt, Artificial Sequence
  Synthetic oligonucleotide
  hsa-miR-4749-5p MIMAT0019885
ugcggggacaggccagggcauc

SEQ ID NO: 1294 - RNA, 22 nt, Artificial Sequence
  Synthetic oligonucleotide
  hsa-miR-7844-5p MIMAT0030419
aaaacuaggacuguguggugua

SEQ ID NO: 1295 - RNA, 22 nt, Artificial Sequence
  Synthetic oligonucleotide
  hsa-miR-3167 MIMAT0015042
aggauuucagaaauacuggugu

SEQ ID NO: 1296 - RNA, 21 nt, Artificial Sequence
  Synthetic oligonucleotide
  hsa-miR-1295b-5p MIMAT0022293
cacccagaucugcggccuaau

SEQ ID NO: 1297 - RNA, 22 nt, Artificial Sequence
  Synthetic oligonucleotide
  hsa-miR-891a-3p MIMAT0026717
aguggcacauguuuguugugag

SEQ ID NO: 1298 - RNA, 21 nt, Artificial Sequence
  Synthetic oligonucleotide
  hsa-miR-215-5p MIMAT0000272
augaccuaugaauugacagac

SEQ ID NO: 1299 - RNA, 25 nt, Artificial Sequence
  Synthetic oligonucleotide
  hsa-miR-1292-5p MIMAT0005943
ugggaacggguuccggcagacgcug

SEQ ID NO: 1300 - RNA, 22 nt, Artificial Sequence
  Synthetic oligonucleotide
  hsa-miR-4670-3p MIMAT0019751
ugaaguuacaucauggucgcuu

SEQ ID NO: 1301 - RNA, 23 nt, Artificial Sequence
  Synthetic oligonucleotide
  hsa-miR-605-5p MIMAT0003273
uaaaucccauggugccuucuccu

SEQ ID NO: 1302 - RNA, 22 nt, Artificial Sequence
  Synthetic oligonucleotide
  hsa-miR-6806-3p MIMAT0027513
ugaagcucugacauuccugcag

SEQ ID NO: 1303 - RNA, 22 nt, Artificial Sequence
  Synthetic oligonucleotide
  hsa-miR-4720-5p MIMAT0019833
ccuggcauauuugguauaacuu

SEQ ID NO: 1304 - RNA, 20 nt, Artificial Sequence
  Synthetic oligonucleotide
  hsa-miR-6758-3p MIMAT0027417
acucauucuccucuguccag

SEQ ID NO: 1305 - RNA, 20 nt, Artificial Sequence
  Synthetic oligonucleotide
  hsa-miR-5684 MIMAT0022473
aacucuagccugagcaacag

SEQ ID NO: 1306 - RNA, 22 nt, Artificial Sequence
  Synthetic oligonucleotide
  hsa-miR-150-5p MIMAT0000451
ucucccaacccuuguaccagug

SEQ ID NO: 1307 - RNA, 23 nt, Artificial Sequence
  Synthetic oligonucleotide
  hsa-miR-361-3p MIMAT0004682
ucccccaggugugauucugauuu

SEQ ID NO: 1308 - RNA, 19 nt, Artificial Sequence
  Synthetic oligonucleotide
  hsa-miR-6133 MIMAT0024617
ugagggaggagguugggua

SEQ ID NO: 1309 - RNA, 22 nt, Artificial Sequence
  Synthetic oligonucleotide
  hsa-miR-4446-3p MIMAT0018965
cagggcuggcagugacaugggu

SEQ ID NO: 1310 - RNA, 18 nt, Artificial Sequence
  Synthetic oligonucleotide
  hsa-miR-4281 MIMAT0016907
gggucccggggagggggg

SEQ ID NO: 1311 - RNA, 22 nt, Artificial Sequence
  Synthetic oligonucleotide
  hsa-miR-628-5p MIMAT0004809
augcugacauauuuacuagagg

SEQ ID NO: 1312 - RNA, 22 nt, Artificial Sequence
  Synthetic oligonucleotide
  hsa-miR-100-3p MIMAT0004512
caagcuuguaucuauagguaug

SEQ ID NO: 1313 - RNA, 22 nt, Artificial Sequence
  Synthetic oligonucleotide
  hsa-miR-3133 MIMAT0014998
uaaagaacucuuaaaacccaau

SEQ ID NO: 1314 - RNA, 22 nt, Artificial Sequence
  Synthetic oligonucleotide
  hsa-miR-4298 MIMAT0016852
cugggacaggaggaggaggcag

SEQ ID NO: 1315 - RNA, 20 nt, Artificial Sequence
  Synthetic oligonucleotide
  hsa-miR-6777-3p MIMAT0027455
uccacucuccuggcccccag

SEQ ID NO: 1316 - RNA, 22 nt, Artificial Sequence
  Synthetic oligonucleotide
  hsa-miR-6759-5p MIMAT0027418
uugugggugggcagaagucugu

SEQ ID NO: 1317 - RNA, 22 nt, Artificial Sequence
  Synthetic oligonucleotide
  hsa-miR-323a-5p MIMAT0004696
aggugguccguggcgcguucgc

SEQ ID NO: 1318 - RNA, 22 nt, Artificial Sequence
  Synthetic oligonucleotide
  hsa-miR-345-5p MIMAT0000772
gcugacuccuaguccagggcuc

SEQ ID NO: 1319 - RNA, 20 nt, Artificial Sequence
  Synthetic oligonucleotide
  hsa-miR-877-5p MIMAT0004949
guagaggagauggcgcaggg

SEQ ID NO: 1320 - RNA, 22 nt, Artificial Sequence
  Synthetic oligonucleotide
  hsa-miR-5008-5p MIMAT0021039
ugaggcccuuggggcacagugg

SEQ ID NO: 1321 - RNA, 22 nt, Artificial Sequence
  Synthetic oligonucleotide
  hsa-miR-27b-5p MIMAT0004588
agagcuuagcugauuggugaac

SEQ ID NO: 1322 - RNA, 23 nt, Artificial Sequence
  Synthetic oligonucleotide
  hsa-miR-301b-3p MIMAT0004958
cagugcaaugauauugucaaagc

SEQ ID NO: 1323 - RNA, 22 nt, Artificial Sequence
  Synthetic oligonucleotide
  hsa-miR-5000-3p MIMAT0021020
ucaggacacuucugaacuugga

SEQ ID NO: 1324 - RNA, 22 nt, Artificial Sequence
  Synthetic oligonucleotide
  hsa-miR-4776-5p MIMAT0019932
guggaccaggauggcaagggcu

SEQ ID NO: 1325 - RNA, 20 nt, Artificial Sequence
  Synthetic oligonucleotide
  hsa-miR-1227-3p MIMAT0005580
cgugccacccuuuuccccag

SEQ ID NO: 1326 - RNA, 22 nt, Artificial Sequence
  Synthetic oligonucleotide
  hsa-miR-659-3p MIMAT0003337
cuugguucagggagggucccca

SEQ ID NO: 1327 - RNA, 22 nt, Artificial Sequence
  Synthetic oligonucleotide
  hsa-miR-92a-2-5p MIMAT0004508
ggguggggauuuguugcauuac

SEQ ID NO: 1328 - RNA, 23 nt, Artificial Sequence
  Synthetic oligonucleotide
  hsa-miR-6813-5p MIMAT0027526
caggggcugggguuucagguucu

SEQ ID NO: 1329 - RNA, 22 nt, Artificial Sequence
  Synthetic oligonucleotide
  hsa-miR-1256 MIMAT0005907
aggcauugacuucucacuagcu

SEQ ID NO: 1330 - RNA, 23 nt, Artificial Sequence
  Synthetic oligonucleotide
  hsa-miR-105-5p MIMAT0000102
ucaaaugcucagacuccuguggu

SEQ ID NO: 1331 - RNA, 22 nt, Artificial Sequence
  Synthetic oligonucleotide
  hsa-miR-4755-3p MIMAT0019896
agccaggcucugaagggaaagu

SEQ ID NO: 1332 - RNA, 21 nt, Artificial Sequence
  Synthetic oligonucleotide
  hsa-miR-640 MIMAT0003310
augauccaggaaccugccucu

SEQ ID NO: 1333 - RNA, 22 nt, Artificial Sequence
  Synthetic oligonucleotide
  hsa-miR-199a-3p MIMAT0000232
acaguagucugcacauugguua

SEQ ID NO: 1334 - RNA, 21 nt, Artificial Sequence
  Synthetic oligonucleotide
  hsa-miR-1224-3p MIMAT0005459
ccccaccuccucucuccucag

SEQ ID NO: 1335 - RNA, 22 nt, Artificial Sequence
  Synthetic oligonucleotide
  hsa-miR-30d-3p MIMAT0004551
cuuucagucagauguuugcugc

SEQ ID NO: 1336 - RNA, 21 nt, Artificial Sequence
  Synthetic oligonucleotide
  hsa-miR-1307-5p MIMAT0022727
ucgaccggaccucgaccggcu

SEQ ID NO: 1337 - RNA, 22 nt, Artificial Sequence
  Synthetic oligonucleotide
  hsa-miR-32-3p MIMAT0004505
caauuuagugugugugauauuu

SEQ ID NO: 1338 - RNA, 17 nt, Artificial Sequence
  Synthetic oligonucleotide
  hsa-miR-4500 MIMAT0019036
ugagguaguaguuucuu

SEQ ID NO: 1339 - RNA, 18 nt, Artificial Sequence
  Synthetic oligonucleotide
  hsa-miR-4273 MIMAT0016903
guguucucugauggacag

SEQ ID NO: 1340 - RNA, 22 nt, Artificial Sequence
  Synthetic oligonucleotide
  hsa-miR-525-3p MIMAT0002839
gaaggcgcuucccuuuagagcg

SEQ ID NO: 1341 - RNA, 23 nt, Artificial Sequence
  Synthetic oligonucleotide
  hsa-miR-708-5p MIMAT0004926
aaggagcuuacaaucuagcuggg

SEQ ID NO: 1342 - RNA, 21 nt, Artificial Sequence
  Synthetic oligonucleotide
  hsa-miR-488-3p MIMAT0004763
uugaaaggcuauuucuugguc

SEQ ID NO: 1343 - RNA, 18 nt, Artificial Sequence
  Synthetic oligonucleotide
  hsa-miR-4466 MIMAT0018993
gggugcgggccggcgggg

SEQ ID NO: 1344 - RNA, 22 nt, Artificial Sequence
  Synthetic oligonucleotide
  hsa-miR-2467-3p MIMAT0019953
agcagaggcagagaggcucagg

SEQ ID NO: 1345 - RNA, 22 nt, Artificial Sequence
  Synthetic oligonucleotide
  hsa-miR-6764-5p MIMAT0027428
ucccagggucuggucagaguug

SEQ ID NO: 1346 - RNA, 23 nt, Artificial Sequence
  Synthetic oligonucleotide
  hsa-miR-3928-5p MIMAT0027037
ugaagcucuaagguuccgccugc

SEQ ID NO: 1347 - RNA, 22 nt, Artificial Sequence
  Synthetic oligonucleotide
  hsa-miR-548y MIMAT0018354
aaaaguaaucacuguuuuugcc

SEQ ID NO: 1348 - RNA, 22 nt, Artificial Sequence
  Synthetic oligonucleotide
  hsa-miR-3914 MIMAT0018188
aaggaaccagaaaaugagaagu

SEQ ID NO: 1349 - RNA, 22 nt, Artificial Sequence
  Synthetic oligonucleotide
  hsa-miR-34a-5p MIMAT0000255
uggcagugucuuagcugguugu

SEQ ID NO: 1350 - RNA, 23 nt, Artificial Sequence
  Synthetic oligonucleotide
  hsa-miR-335-5p MIMAT0000765
ucaagagcaauaacgaaaaaugu

SEQ ID NO: 1351 - RNA, 22 nt, Artificial Sequence
  Synthetic oligonucleotide
  hsa-miR-711 MIMAT0012734
gggacccagggagagacguaag

SEQ ID NO: 1352 - RNA, 19 nt, Artificial Sequence
  Synthetic oligonucleotide
  hsa-miR-5588-3p MIMAT0022296
aagucccacuaaugccagc

SEQ ID NO: 1353 - RNA, 19 nt, Artificial Sequence
  Synthetic oligonucleotide
  hsa-miR-6848-3p MIMAT0027597
guggucucuuggcccccag

SEQ ID NO: 1354 - RNA, 21 nt, Artificial Sequence
  Synthetic oligonucleotide
  hsa-miR-6769a-5p MIMAT0027438
agguggguauggaggagcccu

SEQ ID NO: 1355 - RNA, 23 nt, Artificial Sequence
  Synthetic oligonucleotide
  hsa-miR-5091 MIMAT0021083
acggagacgacaagacugugcug

SEQ ID NO: 1356 - RNA, 22 nt, Artificial Sequence
  Synthetic oligonucleotide
  hsa-miR-26a-5p MIMAT0000082
uucaaguaauccaggauaggcu

SEQ ID NO: 1357 - RNA, 22 nt, Artificial Sequence
  Synthetic oligonucleotide
  hsa-miR-99b-3p MIMAT0004678
caagcucgugucuguggguccg

SEQ ID NO: 1358 - RNA, 24 nt, Artificial Sequence
  Synthetic oligonucleotide
  hsa-miR-4793-5p MIMAT0019965
acauccugcuccacagggcagagg

SEQ ID NO: 1359 - RNA, 22 nt, Artificial Sequence
  Synthetic oligonucleotide
  hsa-miR-6819-5p MIMAT0027538
uugggguggagggccaaggagc

SEQ ID NO: 1360 - RNA, 21 nt, Artificial Sequence
  Synthetic oligonucleotide
  hsa-miR-6747-3p MIMAT0027395
uccugccuuccucugcaccag

SEQ ID NO: 1361 - RNA, 22 nt, Artificial Sequence
  Synthetic oligonucleotide
  hsa-miR-190a-5p MIMAT0000458
ugauauguuugauauauuaggu

SEQ ID NO: 1362 - RNA, 21 nt, Artificial Sequence
  Synthetic oligonucleotide
  hsa-miR-7109-5p MIMAT0028115
cuggggggaggagacccugcu

SEQ ID NO: 1363 - RNA, 21 nt, Artificial Sequence
  Synthetic oligonucleotide
  hsa-miR-6728-3p MIMAT0027358
ucucugcucugcucuccccag

SEQ ID NO: 1364 - RNA, 23 nt, Artificial Sequence
  Synthetic oligonucleotide
  hsa-miR-4647 MIMAT0019709
gaagauggugcugugcugaggaa

SEQ ID NO: 1365 - RNA, 22 nt, Artificial Sequence
  Synthetic oligonucleotide
  hsa-miR-3674 MIMAT0018097
auuguagaaccuaagauuggcc

SEQ ID NO: 1366 - RNA, 22 nt, Artificial Sequence
  Synthetic oligonucleotide
  hsa-miR-3165 MIMAT0015039
agguggaugcaaugugaccuca

SEQ ID NO: 1367 - RNA, 22 nt, Artificial Sequence
  Synthetic oligonucleotide
  hsa-miR-548c-3p MIMAT0003285
caaaaaucucaauuacuuuugc

SEQ ID NO: 1368 - RNA, 18 nt, Artificial Sequence
  Synthetic oligonucleotide
  hsa-miR-4308 MIMAT0016861
ucccuggaguuucuucuu

SEQ ID NO: 1369 - RNA, 22 nt, Artificial Sequence
  Synthetic oligonucleotide
  hsa-miR-6731-5p MIMAT0027363
ugggagagcaggguauugugga

SEQ ID NO: 1370 - RNA, 21 nt, Artificial Sequence
  Synthetic oligonucleotide
  hsa-miR-3130-3p MIMAT0014994
gcugcaccggagacuggguaa

SEQ ID NO: 1371 - RNA, 21 nt, Artificial Sequence
  Synthetic oligonucleotide
  hsa-miR-3666 MIMAT0018088
cagugcaaguguagaugccga

SEQ ID NO: 1372 - RNA, 22 nt, Artificial Sequence
  Synthetic oligonucleotide
  hsa-miR-4639-5p MIMAT0019697
uugcuaaguaggcugagauuga

SEQ ID NO: 1373 - RNA, 21 nt, Artificial Sequence
  Synthetic oligonucleotide
  hsa-miR-297 MIMAT0004450
auguaugugugcaugugcaug

SEQ ID NO: 1374 - RNA, 23 nt, Artificial Sequence
  Synthetic oligonucleotide
  hsa-miR-1264 MIMAT0005791
caagucuuauuugagcaccuguu

SEQ ID NO: 1375 - RNA, 22 nt, Artificial Sequence
  Synthetic oligonucleotide
  hsa-miR-5583-3p MIMAT0022282
gaauauggguauauuaguuugg

SEQ ID NO: 1376 - RNA, 23 nt, Artificial Sequence
  Synthetic oligonucleotide
  hsa-miR-3188 MIMAT0015070
agaggcuuugugcggauacgggg

SEQ ID NO: 1377 - RNA, 22 nt, Artificial Sequence
  Synthetic oligonucleotide
  hsa-let-7a-5p MIMAT0000062
ugagguaguagguuguauaguu

SEQ ID NO: 1378 - RNA, 19 nt, Artificial Sequence
  Synthetic oligonucleotide
  hsa-miR-6080 MIMAT0023705
ucuagugcgggcguucccg

SEQ ID NO: 1379 - RNA, 23 nt, Artificial Sequence
  Synthetic oligonucleotide
  hsa-miR-7-5p MIMAT0000252
uggaagacuagugauuuuguugu

SEQ ID NO: 1380 - RNA, 23 nt, Artificial Sequence
  Synthetic oligonucleotide
  hsa-miR-3136-5p MIMAT0015003
cugacugaauagguagggucauu

SEQ ID NO: 1381 - RNA, 22 nt, Artificial Sequence
  Synthetic oligonucleotide
  hsa-miR-499a-3p MIMAT0004772
aacaucacagcaagucugugcu

SEQ ID NO: 1382 - RNA, 22 nt, Artificial Sequence
  Synthetic oligonucleotide
  hsa-miR-629-3p MIMAT0003298
guucucccaacguaagcccagc

SEQ ID NO: 1383 - RNA, 21 nt, Artificial Sequence
  Synthetic oligonucleotide
  hsa-miR-4771 MIMAT0019925
agcagacuugaccuacaauua

SEQ ID NO: 1384 - RNA, 21 nt, Artificial Sequence
  Synthetic oligonucleotide
  hsa-miR-518d-3p MIMAT0002864
caaagcgcuucccuuuggagc

SEQ ID NO: 1385 - RNA, 23 nt, Artificial Sequence
  Synthetic oligonucleotide
  hsa-miR-6815-5p MIMAT0027530
uagguggcgccggaggagucauu

SEQ ID NO: 1386 - RNA, 22 nt, Artificial Sequence
  Synthetic oligonucleotide
  hsa-miR-6746-5p MIMAT0027392
ccgggagaaggagguggccugg

SEQ ID NO: 1387 - RNA, 23 nt, Artificial Sequence
  Synthetic oligonucleotide
  hsa-miR-6772-3p MIMAT0027445
uugcuccugacucugugcccaca

SEQ ID NO: 1388 - RNA, 22 nt, Artificial Sequence
  Synthetic oligonucleotide
  hsa-miR-130a-5p MIMAT0004593
uucacauugugcuacugucugc

SEQ ID NO: 1389 - RNA, 23 nt, Artificial Sequence
  Synthetic oligonucleotide
  hsa-miR-137 MIMAT0000429
uuauugcuuaagaauacgcguag

SEQ ID NO: 1390 - RNA, 22 nt, Artificial Sequence
  Synthetic oligonucleotide
  hsa-miR-874-3p MIMAT0004911
cugcccuggcccgagggaccga

SEQ ID NO: 1391 - RNA, 21 nt, Artificial Sequence
  Synthetic oligonucleotide
  hsa-miR-331-3p MIMAT0000760
gccccugggccuauccuagaa

SEQ ID NO: 1392 - RNA, 22 nt, Artificial Sequence
  Synthetic oligonucleotide
  hsa-miR-187-3p MIMAT0000262
ucgugucuuguguugcagccgg

SEQ ID NO: 1393 - RNA, 22 nt, Artificial Sequence
  Synthetic oligonucleotide
  hsa-miR-3150a-3p MIMAT0015023
cuggggagauccucgagguugg

SEQ ID NO: 1394 - RNA, 21 nt, Artificial Sequence
  Synthetic oligonucleotide
  hsa-miR-4433b-3p MIMAT0030414
caggaguggggggugggacgu

SEQ ID NO: 1395 - RNA, 20 nt, Artificial Sequence
  Synthetic oligonucleotide
  hsa-miR-924 MIMAT0004974
agagucuugugaugucuugc

SEQ ID NO: 1396 - RNA, 23 nt, Artificial Sequence
  Synthetic oligonucleotide
  hsa-miR-523-3p MIMAT0002840
gaacgcgcuucccuauagagggu

SEQ ID NO: 1397 - RNA, 21 nt, Artificial Sequence
  Synthetic oligonucleotide
  hsa-miR-577 MIMAT0003242
uagauaaaauauugguaccug

SEQ ID NO: 1398 - RNA, 23 nt, Artificial Sequence
  Synthetic oligonucleotide
  hsa-miR-579-3p MIMAT0003244
uucauuugguauaaaccgcgauu

SEQ ID NO: 1399 - RNA, 22 nt, Artificial Sequence
  Synthetic oligonucleotide
  hsa-miR-382-5p MIMAT0000737
gaaguuguucgugguggauucg

SEQ ID NO: 1400 - RNA, 18 nt, Artificial Sequence
  Synthetic oligonucleotide
  hsa-miR-4770 MIMAT0019924
ugagaugacacuguagcu

SEQ ID NO: 1401 - RNA, 21 nt, Artificial Sequence
  Synthetic oligonucleotide
  hsa-miR-8083 MIMAT0031010
caggacuugacggcugcaacu

SEQ ID NO: 1402 - RNA, 22 nt, Artificial Sequence
  Synthetic oligonucleotide
  hsa-miR-218-1-3p MIMAT0004565
augguuccgucaagcaccaugg

SEQ ID NO: 1403 - RNA, 21 nt, Artificial Sequence
  Synthetic oligonucleotide
  hsa-miR-6877-3p MIMAT0027655
cagccucugcccuuggccucc

SEQ ID NO: 1404 - RNA, 20 nt, Artificial Sequence
  Synthetic oligonucleotide
  hsa-miR-3115 MIMAT0014977
auauggguuuacuaguuggu

SEQ ID NO: 1405 - RNA, 23 nt, Artificial Sequence
  Synthetic oligonucleotide
  hsa-miR-4746-5p MIMAT0019880
ccggucccaggagaaccugcaga

SEQ ID NO: 1406 - RNA, 22 nt, Artificial Sequence
  Synthetic oligonucleotide
  hsa-miR-5010-3p MIMAT0021044
uuuugugucucccauuccccag

SEQ ID NO: 1407 - RNA, 22 nt, Artificial Sequence
  Synthetic oligonucleotide
  hsa-miR-376a-5p MIMAT0003386
guagauucuccuucuaugagua

SEQ ID NO: 1408 - RNA, 21 nt, Artificial Sequence
  Synthetic oligonucleotide
  hsa-miR-188-5p MIMAT0000457
caucccuugcaugguggaggg

SEQ ID NO: 1409 - RNA, 21 nt, Artificial Sequence
  Synthetic oligonucleotide
  hsa-miR-7978 MIMAT0031181
ucugguguauagcguugcuca

SEQ ID NO: 1410 - RNA, 20 nt, Artificial Sequence
  Synthetic oligonucleotide
  hsa-miR-4507 MIMAT0019044
cuggguugggcugggcuggg

SEQ ID NO: 1411 - RNA, 22 nt, Artificial Sequence
  Synthetic oligonucleotide
  hsa-miR-495-3p MIMAT0002817
aaacaaacauggugcacuucuu

SEQ ID NO: 1412 - RNA, 17 nt, Artificial Sequence
  Synthetic oligonucleotide
  hsa-miR-4293 MIMAT0016848
cagccugacaggaacag

SEQ ID NO: 1413 - RNA, 17 nt, Artificial Sequence
  Synthetic oligonucleotide
  hsa-miR-4516 MIMAT0019053
gggagaagggucggggc

SEQ ID NO: 1414 - RNA, 22 nt, Artificial Sequence
  Synthetic oligonucleotide
  hsa-miR-4475 MIMAT0019002
caagggaccaagcauucauuau

SEQ ID NO: 1415 - RNA, 20 nt, Artificial Sequence
  Synthetic oligonucleotide
  hsa-miR-1910-3p MIMAT0026917
gaggcagaagcaggaugaca

SEQ ID NO: 1416 - RNA, 22 nt, Artificial Sequence
  Synthetic oligonucleotide
  hsa-miR-4681 MIMAT0019766
aacgggaaugcaggcuguaucu

SEQ ID NO: 1417 - RNA, 23 nt, Artificial Sequence
  Synthetic oligonucleotide
  hsa-miR-152-5p MIMAT0026479
agguucugugauacacuccgacu

SEQ ID NO: 1418 - RNA, 22 nt, Artificial Sequence
  Synthetic oligonucleotide
  hsa-miR-409-3p MIMAT0001639
gaauguugcucggugaaccccu

SEQ ID NO: 1419 - RNA, 22 nt, Artificial Sequence
  Synthetic oligonucleotide
  hsa-miR-204-5p MIMAT0000265
uucccuuugucauccuaugccu

SEQ ID NO: 1420 - RNA, 22 nt, Artificial Sequence
  Synthetic oligonucleotide
  hsa-miR-1249-3p MIMAT0005901
acgcccuucccccccuucuuca

SEQ ID NO: 1421 - RNA, 24 nt, Artificial Sequence
  Synthetic oligonucleotide
  hsa-miR-4787-3p MIMAT0019957
gaugcgccgcccacugccccgcgc

SEQ ID NO: 1422 - RNA, 19 nt, Artificial Sequence
  Synthetic oligonucleotide
  hsa-miR-6071 MIMAT0023696
uucugcugccggccaaggc

SEQ ID NO: 1423 - RNA, 22 nt, Artificial Sequence
  Synthetic oligonucleotide
  hsa-miR-3920 MIMAT0018195
acugauuaucuuaacucucuga

SEQ ID NO: 1424 - RNA, 22 nt, Artificial Sequence
  Synthetic oligonucleotide
  hsa-miR-6879-5p MIMAT0027658
cagggcagggaaggugggagag

SEQ ID NO: 1425 - RNA, 21 nt, Artificial Sequence
  Synthetic oligonucleotide
  hsa-miR-548az-3p MIMAT0025457
aaaaacugcaaucacuuuugc

SEQ ID NO: 1426 - RNA, 21 nt, Artificial Sequence
  Synthetic oligonucleotide
  hsa-miR-6878-3p MIMAT0027657
cuggccucuucuuucuccuag

SEQ ID NO: 1427 - RNA, 22 nt, Artificial Sequence
  Synthetic oligonucleotide
  hsa-miR-183-5p MIMAT0000261
uauggcacugguagaauucacu

SEQ ID NO: 1428 - RNA, 22 nt, Artificial Sequence
  Synthetic oligonucleotide
  hsa-miR-544a MIMAT0003164
auucugcauuuuuagcaaguuc

SEQ ID NO: 1429 - RNA, 22 nt, Artificial Sequence
  Synthetic oligonucleotide
  hsa-miR-135b-3p MIMAT0004698
auguagggcuaaaagccauggg

SEQ ID NO: 1430 - RNA, 20 nt, Artificial Sequence
  Synthetic oligonucleotide
  hsa-miR-7973 MIMAT0031176
ugugacccuagaauaauuac

SEQ ID NO: 1431 - RNA, 22 nt, Artificial Sequence
  Synthetic oligonucleotide
  hsa-miR-548ai MIMAT0018989
aaagguaauugcaguuuuuccc

SEQ ID NO: 1432 - RNA, 22 nt, Artificial Sequence
  Synthetic oligonucleotide
  hsa-miR-501-3p MIMAT0004774
aaugcacccgggcaaggauucu

SEQ ID NO: 1433 - RNA, 22 nt, Artificial Sequence
  Synthetic oligonucleotide
  hsa-miR-4695-5p MIMAT0019788
caggaggcagugggcgagcagg

SEQ ID NO: 1434 - RNA, 21 nt, Artificial Sequence
  Synthetic oligonucleotide
  hsa-miR-1251-3p MIMAT0026741
cgcuuugcucagccaguguag

SEQ ID NO: 1435 - RNA, 22 nt, Artificial Sequence
  Synthetic oligonucleotide
  hsa-miR-4692 MIMAT0019783
ucaggcaguguggguaucagau

SEQ ID NO: 1436 - RNA, 23 nt, Artificial Sequence
  Synthetic oligonucleotide
  hsa-miR-103b MIMAT0007402
ucauagcccuguacaaugcugcu

SEQ ID NO: 1437 - RNA, 22 nt, Artificial Sequence
  Synthetic oligonucleotide
  hsa-miR-548ao-5p MIMAT0021029
agaaguaacuacgguuuuugca

SEQ ID NO: 1438 - RNA, 18 nt, Artificial Sequence
  Synthetic oligonucleotide
  hsa-miR-3665 MIMAT0018087
agcaggugcggggcggcg

SEQ ID NO: 1439 - RNA, 21 nt, Artificial Sequence
  Synthetic oligonucleotide
  hsa-miR-524-3p MIMAT0002850
gaaggcgcuucccuuuggagu

SEQ ID NO: 1440 - RNA, 22 nt, Artificial Sequence
  Synthetic oligonucleotide
  hsa-miR-214-3p MIMAT0000271
acagcaggcacagacaggcagu

SEQ ID NO: 1441 - RNA, 21 nt, Artificial Sequence
  Synthetic oligonucleotide
  hsa-miR-1197 MIMAT0005955
uaggacacauggucuacuucu

SEQ ID NO: 1442 - RNA, 18 nt, Artificial Sequence
  Synthetic oligonucleotide
  hsa-miR-6087 MIMAT0023712
ugaggcgggggggcgagc

SEQ ID NO: 1443 - RNA, 19 nt, Artificial Sequence
  Synthetic oligonucleotide
  hsa-miR-3141 MIMAT0015010
gagggcggguggaggagga

SEQ ID NO: 1444 - RNA, 21 nt, Artificial Sequence
  Synthetic oligonucleotide
  hsa-miR-6885-3p MIMAT0027671
cuuugcuuccugcuccccuag

SEQ ID NO: 1445 - RNA, 23 nt, Artificial Sequence
  Synthetic oligonucleotide
  hsa-miR-346 MIMAT0000773
ugucugcccgcaugccugccucu

SEQ ID NO: 1446 - RNA, 22 nt, Artificial Sequence
  Synthetic oligonucleotide
  hsa-miR-21-5p MIMAT0000076
uagcuuaucagacugauguuga

SEQ ID NO: 1447 - RNA, 22 nt, Artificial Sequence
  Synthetic oligonucleotide
  hsa-miR-197-3p MIMAT0000227
uucaccaccuucuccacccagc

SEQ ID NO: 1448 - RNA, 22 nt, Artificial Sequence
  Synthetic oligonucleotide
  hsa-miR-5582-3p MIMAT0022280
uaaaacuuuaagugugccuagg

SEQ ID NO: 1449 - RNA, 22 nt, Artificial Sequence
  Synthetic oligonucleotide
  hsa-miR-4786-5p MIMAT0019954
ugagaccaggacuggaugcacc

SEQ ID NO: 1450 - RNA, 16 nt, Artificial Sequence
  Synthetic oligonucleotide
  hsa-miR-4485-5p MIMAT0032116
accgccugcccaguga

SEQ ID NO: 1451 - RNA, 21 nt, Artificial Sequence
  Synthetic oligonucleotide
  hsa-miR-205-3p MIMAT0009197
gauuucaguggagugaaguuc

SEQ ID NO: 1452 - RNA, 22 nt, Artificial Sequence
  Synthetic oligonucleotide
  hsa-miR-513c-5p MIMAT0005789
uucucaaggaggugucguuuau

SEQ ID NO: 1453 - RNA, 21 nt, Artificial Sequence
  Synthetic oligonucleotide
  hsa-miR-8066 MIMAT0030993
caaugugaucuuuuggaugua

SEQ ID NO: 1454 - RNA, 23 nt, Artificial Sequence
  Synthetic oligonucleotide
  hsa-miR-145-5p MIMAT0000437
guccaguuuucccaggaaucccu

SEQ ID NO: 1455 - RNA, 22 nt, Artificial Sequence
  Synthetic oligonucleotide
  hsa-miR-5693 MIMAT0022486
gcaguggcucugaaaugaacuc

SEQ ID NO: 1456 - RNA, 22 nt, Artificial Sequence
  Synthetic oligonucleotide
  hsa-miR-4801 MIMAT0019980
uacacaagaaaaccaaggcuca

SEQ ID NO: 1457 - RNA, 22 nt, Artificial Sequence
  Synthetic oligonucleotide
  hsa-miR-4780 MIMAT0019939
acccuugagccugaucccuagc

SEQ ID NO: 1458 - RNA, 22 nt, Artificial Sequence
  Synthetic oligonucleotide
  hsa-miR-3935 MIMAT0018350
uguagauacgagcaccagccac

SEQ ID NO: 1459 - RNA, 23 nt, Artificial Sequence
  Synthetic oligonucleotide
  hsa-miR-602 MIMAT0003270
gacacgggcgacagcugcggccc

SEQ ID NO: 1460 - RNA, 21 nt, Artificial Sequence
  Synthetic oligonucleotide
  hsa-miR-2355-5p MIMAT0016895
auccccagauacaauggacaa

SEQ ID NO: 1461 - RNA, 24 nt, Artificial Sequence
  Synthetic oligonucleotide
  hsa-miR-8065 MIMAT0030992
uguaggaacaguugaauuuuggcu

SEQ ID NO: 1462 - RNA, 19 nt, Artificial Sequence
  Synthetic oligonucleotide
  hsa-miR-4252 MIMAT0016886
ggccacugagucagcacca

SEQ ID NO: 1463 - RNA, 20 nt, Artificial Sequence
  Synthetic oligonucleotide
  hsa-miR-4768-3p MIMAT0019921
ccaggagauccagagagaau

SEQ ID NO: 1464 - RNA, 21 nt, Artificial Sequence
  Synthetic oligonucleotide
  hsa-miR-552-5p MIMAT0026615
guuuaaccuuuugccuguugg

SEQ ID NO: 1465 - RNA, 19 nt, Artificial Sequence
  Synthetic oligonucleotide
  hsa-miR-668-5p MIMAT0026636
ugcgccucgggugagcaug

SEQ ID NO: 1466 - RNA, 22 nt, Artificial Sequence
  Synthetic oligonucleotide
  hsa-miR-5582-5p MIMAT0022279
uaggcacacuuaaaguuauagc

SEQ ID NO: 1467 - DNA, 20 bp, Artificial Sequence
  Synthetic oligonucleotide
  hsa-miR-6124 MIMAT0024597
gggaaaaggaagggggagga

SEQ ID NO: 1468 - RNA, 20 nt, Artificial Sequence
  Synthetic oligonucleotide
  hsa-miR-4453 MIMAT0018975
gagcuuggucuguagcgguu

SEQ ID NO: 1469 - RNA, 22 nt, Artificial Sequence
  Synthetic oligonucleotide
  hsa-miR-3689b-3p MIMAT0018181
cugggaggugugauauuguggu

SEQ ID NO: 1470 - RNA, 22 nt, Artificial Sequence
  Synthetic oligonucleotide
  hsa-miR-433-3p MIMAT0001627
aucaugaugggcuccucggugu

SEQ ID NO: 1471 - RNA, 22 nt, Artificial Sequence
  Synthetic oligonucleotide
  hsa-miR-187-5p MIMAT0004561
ggcuacaacacaggacccgggc

SEQ ID NO: 1472 - RNA, 22 nt, Artificial Sequence
  Synthetic oligonucleotide
  hsa-miR-1293 MIMAT0005883
uggguggucuggagauuugugc

SEQ ID NO: 1473 - RNA, 20 nt, Artificial Sequence
  Synthetic oligonucleotide
  hsa-miR-613 MIMAT0003281
aggaauguuccuucuuugcc

SEQ ID NO: 1474 - RNA, 22 nt, Artificial Sequence
  Synthetic oligonucleotide
  hsa-miR-6830-5p MIMAT0027560
ccaaggaaggaggcuggacauc

SEQ ID NO: 1475 - RNA, 20 nt, Artificial Sequence
  Synthetic oligonucleotide
  hsa-miR-4749-3p MIMAT0019886
cgccccuccugcccccacag

SEQ ID NO: 1476 - RNA, 22 nt, Artificial Sequence
  Synthetic oligonucleotide
  hsa-miR-1225-3p MIMAT0005573
ugagccccugugccgcccccag

SEQ ID NO: 1477 - RNA, 22 nt, Artificial Sequence
  Synthetic oligonucleotide
  hsa-miR-4643 MIMAT0019703
gacacaugaccauaaaugcuaa

SEQ ID NO: 1478 - RNA, 20 nt, Artificial Sequence
  Synthetic oligonucleotide
  hsa-miR-6850-3p MIMAT0027601
cccggccggaacgccgcacu

SEQ ID NO: 1479 - RNA, 23 nt, Artificial Sequence
  Synthetic oligonucleotide
  hsa-miR-302d-3p MIMAT0000718
uaagugcuuccauguuugagugu

SEQ ID NO: 1480 - RNA, 22 nt, Artificial Sequence
  Synthetic oligonucleotide
  hsa-miR-210-3p MIMAT0000267
cugugcgugugacagcggcuga

SEQ ID NO: 1481 - RNA, 23 nt, Artificial Sequence
  Synthetic oligonucleotide
  hsa-miR-6762-5p MIMAT0027424
cggggccauggagcagccugugu

SEQ ID NO: 1482 - RNA, 21 nt, Artificial Sequence
  Synthetic oligonucleotide
  hsa-miR-3177-3p MIMAT0015054
ugcacggcacuggggacacgu

SEQ ID NO: 1483 - RNA, 22 nt, Artificial Sequence
  Synthetic oligonucleotide
  hsa-miR-4687-5p MIMAT0019774
cagcccuccucccgcacccaaa

SEQ ID NO: 1484 - RNA, 23 nt, Artificial Sequence
  Synthetic oligonucleotide
  hsa-miR-2682-5p MIMAT0013517
caggcagugacuguucagacguc

SEQ ID NO: 1485 - RNA, 22 nt, Artificial Sequence
  Synthetic oligonucleotide
  hsa-miR-520f-3p MIMAT0002830
aagugcuuccuuuuagaggguu

SEQ ID NO: 1486 - RNA, 21 nt, Artificial Sequence
  Synthetic oligonucleotide
  hsa-miR-656-5p MIMAT0026627
agguugccugugagguguuca

SEQ ID NO: 1487 - RNA, 23 nt, Artificial Sequence
  Synthetic oligonucleotide
  hsa-miR-5197-3p MIMAT0021131
aagaagagacugagucaucgaau

SEQ ID NO: 1488 - RNA, 22 nt, Artificial Sequence
  Synthetic oligonucleotide
  hsa-miR-487a-3p MIMAT0002178
aaucauacagggacauccaguu

SEQ ID NO: 1489 - RNA, 22 nt, Artificial Sequence
  Synthetic oligonucleotide
  hsa-miR-30d-5p MIMAT0000245
uguaaacauccccgacuggaag

SEQ ID NO: 1490 - RNA, 18 nt, Artificial Sequence
  Synthetic oligonucleotide
  hsa-miR-548av-5p MIMAT0022303
aaaaguacuugcggauuu

SEQ ID NO: 1491 - RNA, 21 nt, Artificial Sequence
  Synthetic oligonucleotide
  hsa-miR-6827-3p MIMAT0027555
accgucucuucuguuccccag

SEQ ID NO: 1492 - RNA, 22 nt, Artificial Sequence
  Synthetic oligonucleotide
  hsa-miR-518d-5p MIMAT0005456
cucuagagggaagcacuuucug

SEQ ID NO: 1493 - RNA, 24 nt, Artificial Sequence
  Synthetic oligonucleotide
  hsa-miR-637 MIMAT0003307
acugggggcuuucgggcucugcgu

SEQ ID NO: 1494 - RNA, 22 nt, Artificial Sequence
  Synthetic oligonucleotide
  hsa-miR-4740-5p MIMAT0019869
aggacugauccucucgggcagg

SEQ ID NO: 1495 - RNA, 21 nt, Artificial Sequence
  Synthetic oligonucleotide
  hsa-miR-7108-5p MIMAT0028113
guguggccggcaggcgggugg

SEQ ID NO: 1496 - RNA, 23 nt, Artificial Sequence
  Synthetic oligonucleotide
  hsa-miR-6887-5p MIMAT0027674
uggggggacagauggagaggaca

SEQ ID NO: 1497 - RNA, 21 nt, Artificial Sequence
  Synthetic oligonucleotide
  hsa-miR-520b MIMAT0002843
aaagugcuuccuuuuagaggg

SEQ ID NO: 1498 - RNA, 23 nt, Artificial Sequence
  Synthetic oligonucleotide
  hsa-miR-3690 MIMAT0018119
accuggacccagcguagacaaag

SEQ ID NO: 1499 - RNA, 23 nt, Artificial Sequence
  Synthetic oligonucleotide
  hsa-miR-34b-5p MIMAT0000685
uaggcagugucauuagcugauug

SEQ ID NO: 1500 - RNA, 23 nt, Artificial Sequence
  Synthetic oligonucleotide
  hsa-miR-6786-3p MIMAT0027473
ugacgccccuucugauucugccu

SEQ ID NO: 1501 - RNA, 22 nt, Artificial Sequence
  Synthetic oligonucleotide
  hsa-miR-518a-3p MIMAT0002863
gaaagcgcuucccuuugcugga

SEQ ID NO: 1502 - RNA, 19 nt, Artificial Sequence
  Synthetic oligonucleotide
  hsa-miR-645 MIMAT0003315
ucuaggcugguacugcuga

SEQ ID NO: 1503 - RNA, 22 nt, Artificial Sequence
  Synthetic oligonucleotide
  hsa-miR-3975 MIMAT0019360
ugaggcuaaugcacuacuucac

SEQ ID NO: 1504 - RNA, 23 nt, Artificial Sequence
  Synthetic oligonucleotide
  hsa-miR-17-5p MIMAT0000070
caaagugcuuacagugcagguag

SEQ ID NO: 1505 - RNA, 20 nt, Artificial Sequence
  Synthetic oligonucleotide
  hsa-miR-4524b-3p MIMAT0022256
gagacagguucaugcugcua

SEQ ID NO: 1506 - RNA, 22 nt, Artificial Sequence
  Synthetic oligonucleotide
  hsa-miR-6895-3p MIMAT0027691
ugucucucgcccuuggccuuag

SEQ ID NO: 1507 - RNA, 22 nt, Artificial Sequence
  Synthetic oligonucleotide
  hsa-miR-6873-5p MIMAT0027646
cagagggaauacagagggcaau

SEQ ID NO: 1508 - RNA, 21 nt, Artificial Sequence
  Synthetic oligonucleotide
  hsa-miR-4674 MIMAT0019756
cugggcucgggacgcgcggcu

SEQ ID NO: 1509 - RNA, 22 nt, Artificial Sequence
  Synthetic oligonucleotide
  hsa-miR-3200-5p MIMAT0017392
aaucugagaaggcgcacaaggu

SEQ ID NO: 1510 - RNA, 21 nt, Artificial Sequence
  Synthetic oligonucleotide
  hsa-miR-2909 MIMAT0013863
guuagggccaacaucucuugg

SEQ ID NO: 1511 - RNA, 23 nt, Artificial Sequence
  Synthetic oligonucleotide
  hsa-miR-4730 MIMAT0019852
cuggcggagcccauuccaugcca

SEQ ID NO: 1512 - RNA, 22 nt, Artificial Sequence
  Synthetic oligonucleotide
  hsa-miR-3681-5p MIMAT0018108
uaguggaugaugcacucugugc

SEQ ID NO: 1513 - RNA, 22 nt, Artificial Sequence
  Synthetic oligonucleotide
  hsa-miR-6876-5p MIMAT0027652
caggaaggagacaggcaguuca

SEQ ID NO: 1514 - RNA, 23 nt, Artificial Sequence
  Synthetic oligonucleotide
  hsa-miR-302b-3p MIMAT0000715
uaagugcuuccauguuuuaguag

SEQ ID NO: 1515 - RNA, 22 nt, Artificial Sequence
  Synthetic oligonucleotide
  hsa-miR-92b-3p MIMAT0003218
uauugcacucgucccggccucc

SEQ ID NO: 1516 - RNA, 21 nt, Artificial Sequence
  Synthetic oligonucleotide
  hsa-miR-3140-5p MIMAT0019204
accugaauuaccaaaagcuuu

SEQ ID NO: 1517 - RNA, 22 nt, Artificial Sequence
  Synthetic oligonucleotide
  hsa-miR-3680-5p MIMAT0018106
gacucacucacaggauugugca

SEQ ID NO: 1518 - RNA, 23 nt, Artificial Sequence
  Synthetic oligonucleotide
  hsa-miR-8069 MIMAT0030996
ggaugguugggggcggucggcgu

SEQ ID NO: 1519 - RNA, 22 nt, Artificial Sequence
  Synthetic oligonucleotide
  hsa-miR-6506-3p MIMAT0025469
ucguaucagagauuccagacac

SEQ ID NO: 1520 - RNA, 20 nt, Artificial Sequence
  Synthetic oligonucleotide
  hsa-miR-3187-3p MIMAT0015069
uuggccauggggcugcgcgg

SEQ ID NO: 1521 - RNA, 22 nt, Artificial Sequence
  Synthetic oligonucleotide
  hsa-miR-758-5p MIMAT0022929
gaugguugaccagagagcacac

SEQ ID NO: 1522 - RNA, 23 nt, Artificial Sequence
  Synthetic oligonucleotide
  hsa-miR-5089-3p MIMAT0022984
augcuacucggaaaucccacuga

SEQ ID NO: 1523 - RNA, 23 nt, Artificial Sequence
  Synthetic oligonucleotide
  hsa-miR-3977 MIMAT0019362
gugcuucaucguaauuaaccuua

SEQ ID NO: 1524 - RNA, 22 nt, Artificial Sequence
  Synthetic oligonucleotide
  hsa-miR-5682 MIMAT0022470
guagcaccuugcaggauaaggu

SEQ ID NO: 1525 - RNA, 22 nt, Artificial Sequence
  Synthetic oligonucleotide
  hsa-miR-377-5p MIMAT0004689
agagguugcccuuggugaauuc

SEQ ID NO: 1526 - RNA, 22 nt, Artificial Sequence
  Synthetic oligonucleotide
  hsa-miR-4695-3p MIMAT0019789
ugaucucaccgcugccuccuuc

SEQ ID NO: 1527 - RNA, 20 nt, Artificial Sequence
  Synthetic oligonucleotide
  hsa-miR-562 MIMAT0003226
aaaguagcuguaccauuugc

SEQ ID NO: 1528 - RNA, 17 nt, Artificial Sequence
  Synthetic oligonucleotide
  hsa-miR-4328 MIMAT0016926
ccaguuuucccaggauu

SEQ ID NO: 1529 - RNA, 20 nt, Artificial Sequence
  Synthetic oligonucleotide
  hsa-miR-202-3p MIMAT0002811
agagguauagggcaugggaa

SEQ ID NO: 1530 - RNA, 21 nt, Artificial Sequence
  Synthetic oligonucleotide
  hsa-miR-5196-3p MIMAT0021129
ucauccucgucucccucccag

SEQ ID NO: 1531 - RNA, 18 nt, Artificial Sequence
  Synthetic oligonucleotide
  hsa-miR-4314 MIMAT0016868
cucugggaaaugggacag

SEQ ID NO: 1532 - RNA, 22 nt, Artificial Sequence
  Synthetic oligonucleotide
  hsa-miR-3681-3p MIMAT0018109
acacagugcuucauccacuacu

SEQ ID NO: 1533 - RNA, 21 nt, Artificial Sequence
  Synthetic oligonucleotide
  hsa-miR-2114-3p MIMAT0011157
cgagccucaagcaagggacuu

SEQ ID NO: 1534 - RNA, 22 nt, Artificial Sequence
  Synthetic oligonucleotide
  hsa-miR-5692a MIMAT0022484
caaauaauaccacagugggugu

SEQ ID NO: 1535 - RNA, 22 nt, Artificial Sequence
  Synthetic oligonucleotide
  hsa-miR-615-5p MIMAT0004804
ggggguccccggugcucggauc

SEQ ID NO: 1536 - RNA, 22 nt, Artificial Sequence
  Synthetic oligonucleotide
  hsa-miR-3677-3p MIMAT0018101
cucgugggcucuggccacggcc

SEQ ID NO: 1537 - RNA, 22 nt, Artificial Sequence
  Synthetic oligonucleotide
  hsa-miR-138-1-3p MIMAT0004607
gcuacuucacaacaccagggcc

SEQ ID NO: 1538 - RNA, 24 nt, Artificial Sequence
  Synthetic oligonucleotide
  hsa-miR-4641 MIMAT0019701
ugcccaugccauacuuuugccuca

SEQ ID NO: 1539 - RNA, 22 nt, Artificial Sequence
  Synthetic oligonucleotide
  hsa-miR-370-5p MIMAT0026483
caggucacgucucugcaguuac

SEQ ID NO: 1540 - RNA, 23 nt, Artificial Sequence
  Synthetic oligonucleotide
  hsa-miR-4732-5p MIMAT0019855
uguagagcagggagcaggaagcu

SEQ ID NO: 1541 - RNA, 21 nt, Artificial Sequence
  Synthetic oligonucleotide
  hsa-miR-6760-3p MIMAT0027421
acacuguccccuucuccccag

SEQ ID NO: 1542 - RNA, 18 nt, Artificial Sequence
  Synthetic oligonucleotide
  hsa-miR-7162-5p MIMAT0028234
ugcuuccuuucucagcug

SEQ ID NO: 1543 - RNA, 24 nt, Artificial Sequence
  Synthetic oligonucleotide
  hsa-miR-8060 MIMAT0030987
ccaugaagcaguggguaggaggac

SEQ ID NO: 1544 - DNA, 21 bp, Artificial Sequence
  Synthetic oligonucleotide
  hsa-miR-1237-5p MIMAT0022946
cgggggcggggccgaagcgcg

SEQ ID NO: 1545 - RNA, 22 nt, Artificial Sequence
  Synthetic oligonucleotide
  hsa-miR-4421 MIMAT0018934
accugucuguggaaaggagcua

SEQ ID NO: 1546 - RNA, 17 nt, Artificial Sequence
  Synthetic oligonucleotide
  hsa-miR-3195 MIMAT0015079
cgcgccgggcccggguu

SEQ ID NO: 1547 - RNA, 22 nt, Artificial Sequence
  Synthetic oligonucleotide
  hsa-miR-193a-5p MIMAT0004614
ugggucuuugcgggcgagauga

SEQ ID NO: 1548 - RNA, 17 nt, Artificial Sequence
  Synthetic oligonucleotide
  hsa-miR-4486 MIMAT0019020
gcugggcgaggcuggca

SEQ ID NO: 1549 - RNA, 17 nt, Artificial Sequence
  Synthetic oligonucleotide
  hsa-miR-4534 MIMAT0019073
ggauggaggaggggucu

SEQ ID NO: 1550 - RNA, 22 nt, Artificial Sequence
  Synthetic oligonucleotide
  hsa-miR-2278 MIMAT0011778
gagagcaguguguguugccugg

SEQ ID NO: 1551 - RNA, 21 nt, Artificial Sequence
  Synthetic oligonucleotide
  hsa-miR-892c-5p MIMAT0025857
uauucagaaaggugccaguca

SEQ ID NO: 1552 - RNA, 21 nt, Artificial Sequence
  Synthetic oligonucleotide
  hsa-miR-1179 MIMAT0005824
aagcauucuuucauugguugg

SEQ ID NO: 1553 - RNA, 20 nt, Artificial Sequence
  Synthetic oligonucleotide
  hsa-miR-6834-3p MIMAT0027569
uaugucccaucccuccauca

SEQ ID NO: 1554 - RNA, 22 nt, Artificial Sequence
  Synthetic oligonucleotide
  hsa-miR-380-5p MIMAT0000734
ugguugaccauagaacaugcgc

SEQ ID NO: 1555 - RNA, 22 nt, Artificial Sequence
  Synthetic oligonucleotide
  hsa-miR-6759-3p MIMAT0027419
ugaccuuugccucuccccucag

SEQ ID NO: 1556 - RNA, 23 nt, Artificial Sequence
  Synthetic oligonucleotide
  hsa-miR-19b-1-5p MIMAT0004491
aguuuugcagguuugcauccagc

SEQ ID NO: 1557 - RNA, 23 nt, Artificial Sequence
  Synthetic oligonucleotide
  hsa-miR-500a-5p MIMAT0004773
uaauccuugcuaccugggugaga

SEQ ID NO: 1558 - RNA, 22 nt, Artificial Sequence
  Synthetic oligonucleotide
  hsa-miR-744-5p MIMAT0004945
ugcggggcuagggcuaacagca

SEQ ID NO: 1559 - RNA, 22 nt, Artificial Sequence
  Synthetic oligonucleotide
  hsa-miR-26a-2-3p MIMAT0004681
ccuauucuugauuacuuguuuc

SEQ ID NO: 1560 - RNA, 23 nt, Artificial Sequence
  Synthetic oligonucleotide
  hsa-miR-3605-3p MIMAT0017982
ccuccguguuaccuguccucuag

SEQ ID NO: 1561 - RNA, 22 nt, Artificial Sequence
  Synthetic oligonucleotide
  hsa-miR-34a-3p MIMAT0004557
caaucagcaaguauacugcccu

SEQ ID NO: 1562 - RNA, 22 nt, Artificial Sequence
  Synthetic oligonucleotide
  hsa-miR-4677-3p MIMAT0019761
ucugugagaccaaagaacuacu

SEQ ID NO: 1563 - RNA, 20 nt, Artificial Sequence
  Synthetic oligonucleotide
  hsa-miR-3653-5p MIMAT0032110
ccuccugaugauucuucuuc

SEQ ID NO: 1564 - RNA, 22 nt, Artificial Sequence
  Synthetic oligonucleotide
  hsa-miR-758-3p MIMAT0003879
uuugugaccugguccacuaacc

SEQ ID NO: 1565 - RNA, 22 nt, Artificial Sequence
  Synthetic oligonucleotide
  hsa-miR-3122 MIMAT0014984
guugggacaagaggacggucuu

SEQ ID NO: 1566 - RNA, 20 nt, Artificial Sequence
  Synthetic oligonucleotide
  hsa-miR-6732-5p MIMAT0027365
uaggggguggcaggcuggcc

SEQ ID NO: 1567 - RNA, 18 nt, Artificial Sequence
  Synthetic oligonucleotide
  hsa-miR-4274 MIMAT0016906
cagcagucccucccccug

SEQ ID NO: 1568 - RNA, 23 nt, Artificial Sequence
  Synthetic oligonucleotide
  hsa-miR-598-5p MIMAT0026620
gcggugaucccgauggugugagc

SEQ ID NO: 1569 - RNA, 22 nt, Artificial Sequence
  Synthetic oligonucleotide
  hsa-miR-4465 MIMAT0018992
cucaaguagucugaccagggga

SEQ ID NO: 1570 - RNA, 21 nt, Artificial Sequence
  Synthetic oligonucleotide
  hsa-miR-548ar-3p MIMAT0022266
uaaaacugcaguuauuuuugc

SEQ ID NO: 1571 - RNA, 21 nt, Artificial Sequence
  Synthetic oligonucleotide
  hsa-miR-4690-3p MIMAT0019780
gcagcccagcugaggccucug

SEQ ID NO: 1572 - RNA, 22 nt, Artificial Sequence
  Synthetic oligonucleotide
  hsa-miR-202-5p MIMAT0002810
uuccuaugcauauacuucuuug

SEQ ID NO: 1573 - RNA, 20 nt, Artificial Sequence
  Synthetic oligonucleotide
  hsa-miR-378d MIMAT0018926
acuggacuuggagucagaaa

SEQ ID NO: 1574 - RNA, 25 nt, Artificial Sequence
  Synthetic oligonucleotide
  hsa-miR-6765-5p MIMAT0027430
gugaggcggggccaggagggugugu

SEQ ID NO: 1575 - RNA, 23 nt, Artificial Sequence
  Synthetic oligonucleotide
  hsa-miR-6511a-5p MIMAT0025478
caggcagaaguggggcugacagg

SEQ ID NO: 1576 - RNA, 21 nt, Artificial Sequence
  Synthetic oligonucleotide
  hsa-miR-1267 MIMAT0005921
ccuguugaaguguaaucccca

SEQ ID NO: 1577 - RNA, 23 nt, Artificial Sequence
  Synthetic oligonucleotide
  hsa-miR-4668-5p MIMAT0019745
agggaaaaaaaaaaggauuuguc

SEQ ID NO: 1578 - RNA, 22 nt, Artificial Sequence
  Synthetic oligonucleotide
  hsa-miR-6730-3p MIMAT0027362
ccugacaccccaucugcccuca

SEQ ID NO: 1579 - RNA, 22 nt, Artificial Sequence
  Synthetic oligonucleotide
  hsa-miR-4671-5p MIMAT0019752
accgaagacugugcgcuaaucu

SEQ ID NO: 1580 - RNA, 20 nt, Artificial Sequence
  Synthetic oligonucleotide
  hsa-miR-920 MIMAT0004970
ggggagcuguggaagcagua

SEQ ID NO: 1581 - RNA, 23 nt, Artificial Sequence
  Synthetic oligonucleotide
  hsa-miR-6826-5p MIMAT0027552
ucaauaggaaagaggugggaccu

SEQ ID NO: 1582 - RNA, 22 nt, Artificial Sequence
  Synthetic oligonucleotide
  hsa-miR-5092 MIMAT0021084
aauccacgcugagcuuggcauc

SEQ ID NO: 1583 - RNA, 22 nt, Artificial Sequence
  Synthetic oligonucleotide
  hsa-miR-135a-3p MIMAT0004595
uauagggauuggagccguggcg

SEQ ID NO: 1584 - RNA, 18 nt, Artificial Sequence
  Synthetic oligonucleotide
  hsa-miR-516a-3p MIMAT0006778
ugcuuccuuucagagggu

SEQ ID NO: 1585 - RNA, 22 nt, Artificial Sequence
  Synthetic oligonucleotide
  hsa-miR-548b-5p MIMAT0004798
aaaaguaauugugguuuuggcc

SEQ ID NO: 1586 - RNA, 22 nt, Artificial Sequence
  Synthetic oligonucleotide
  hsa-miR-4513 MIMAT0019050
agacugacggcuggaggcccau

SEQ ID NO: 1587 - RNA, 22 nt, Artificial Sequence
  Synthetic oligonucleotide
  hsa-miR-518e-5p MIMAT0005450
cucuagagggaagcgcuuucug

SEQ ID NO: 1588 - RNA, 22 nt, Artificial Sequence
  Synthetic oligonucleotide
  hsa-miR-205-5p MIMAT0000266
uccuucauuccaccggagucug

SEQ ID NO: 1589 - RNA, 19 nt, Artificial Sequence
  Synthetic oligonucleotide
  hsa-miR-593-3p MIMAT0004802
ugucucugcugggguuucu

SEQ ID NO: 1590 - RNA, 22 nt, Artificial Sequence
  Synthetic oligonucleotide
  hsa-miR-6836-5p MIMAT0027574
cgcagggcccuggcgcaggcau

SEQ ID NO: 1591 - RNA, 21 nt, Artificial Sequence
  Synthetic oligonucleotide
  hsa-miR-6515-5p MIMAT0025486
uuggaggguguggaagacauc

SEQ ID NO: 1592 - RNA, 21 nt, Artificial Sequence
  Synthetic oligonucleotide
  hsa-miR-653-5p MIMAT0003328
guguugaaacaaucucuacug

SEQ ID NO: 1593 - RNA, 23 nt, Artificial Sequence
  Synthetic oligonucleotide
  hsa-miR-6503-5p MIMAT0025462
aggucugcauucaaauccccaga

SEQ ID NO: 1594 - RNA, 21 nt, Artificial Sequence
  Synthetic oligonucleotide
  hsa-miR-6504-5p MIMAT0025464
ucuggcugugcuguaaugcag

SEQ ID NO: 1595 - RNA, 22 nt, Artificial Sequence
  Synthetic oligonucleotide
  hsa-miR-627-5p MIMAT0003296
gugagucucuaagaaaagagga

SEQ ID NO: 1596 - RNA, 22 nt, Artificial Sequence
  Synthetic oligonucleotide
  hsa-miR-3618 MIMAT0017998
ugucuacauuaaugaaaagagc

SEQ ID NO: 1597 - RNA, 21 nt, Artificial Sequence
  Synthetic oligonucleotide
  hsa-miR-5186 MIMAT0021116
agagauugguagaaaucaggu

SEQ ID NO: 1598 - RNA, 23 nt, Artificial Sequence
  Synthetic oligonucleotide
  hsa-miR-513a-3p MIMAT0004777
uaaauuucaccuuucugagaagg

SEQ ID NO: 1599 - RNA, 22 nt, Artificial Sequence
  Synthetic oligonucleotide
  hsa-miR-210-5p MIMAT0026475
agccccugcccaccgcacacug

SEQ ID NO: 1600 - RNA, 22 nt, Artificial Sequence
  Synthetic oligonucleotide
  hsa-miR-5196-5p MIMAT0021128
agggaaggggacgaggguuggg

SEQ ID NO: 1601 - RNA, 19 nt, Artificial Sequence
  Synthetic oligonucleotide
  hsa-miR-6078 MIMAT0023703
ccgccugagcuagcugugg

SEQ ID NO: 1602 - RNA, 22 nt, Artificial Sequence
  Synthetic oligonucleotide
  hsa-miR-4708-3p MIMAT0019810
agcaaggcggcaucucucugau

SEQ ID NO: 1603 - RNA, 22 nt, Artificial Sequence
  Synthetic oligonucleotide
  hsa-miR-3173-5p MIMAT0019214
ugcccugccuguuuucuccuuu

SEQ ID NO: 1604 - RNA, 21 nt, Artificial Sequence
  Synthetic oligonucleotide
  hsa-miR-4748 MIMAT0019884
gagguuuggggaggauuugcu

SEQ ID NO: 1605 - RNA, 18 nt, Artificial Sequence
  Synthetic oligonucleotide
  hsa-miR-4302 MIMAT0016855
ccaguguggcucagcgag

SEQ ID NO: 1606 - RNA, 21 nt, Artificial Sequence
  Synthetic oligonucleotide
  hsa-miR-4735-3p MIMAT0019861
aaaggugcucaaauuagacau

SEQ ID NO: 1607 - RNA, 22 nt, Artificial Sequence
  Synthetic oligonucleotide
  hsa-miR-223-3p MIMAT0000280
ugucaguuugucaaauacccca

SEQ ID NO: 1608 - RNA, 21 nt, Artificial Sequence
  Synthetic oligonucleotide
  hsa-miR-142-5p MIMAT0000433
cauaaaguagaaagcacuacu

SEQ ID NO: 1609 - RNA, 22 nt, Artificial Sequence
  Synthetic oligonucleotide
  hsa-miR-6803-3p MIMAT0027507
ucccucgccuucucacccucag

SEQ ID NO: 1610 - RNA, 22 nt, Artificial Sequence
  Synthetic oligonucleotide
  hsa-miR-6511a-3p MIMAT0025479
ccucaccaucccuucugccugc

SEQ ID NO: 1611 - RNA, 21 nt, Artificial Sequence
  Synthetic oligonucleotide
  hsa-miR-507 MIMAT0002879
uuuugcaccuuuuggagugaa

SEQ ID NO: 1612 - RNA, 22 nt, Artificial Sequence
  Synthetic oligonucleotide
  hsa-miR-5583-5p MIMAT0022281
aaacuaauauacccauauucug

SEQ ID NO: 1613 - RNA, 24 nt, Artificial Sequence
  Synthetic oligonucleotide
  hsa-miR-3171 MIMAT0015046
agauguauggaaucuguauauauc

SEQ ID NO: 1614 - RNA, 22 nt, Artificial Sequence
  Synthetic oligonucleotide
  hsa-miR-3908 MIMAT0018182
gagcaauguagguagacuguuu

SEQ ID NO: 1615 - RNA, 21 nt, Artificial Sequence
  Synthetic oligonucleotide
  hsa-miR-4761-5p MIMAT0019908
acaaggugugcaugccugacc

SEQ ID NO: 1616 - RNA, 24 nt, Artificial Sequence
  Synthetic oligonucleotide
  hsa-miR-8053 MIMAT0030980
uggcgauuuuggaacucaauggca

SEQ ID NO: 1617 - RNA, 22 nt, Artificial Sequence
  Synthetic oligonucleotide
  hsa-miR-186-3p MIMAT0004612
gcccaaaggugaauuuuuuggg

SEQ ID NO: 1618 - RNA, 22 nt, Artificial Sequence
  Synthetic oligonucleotide
  hsa-miR-3689d MIMAT0019008
gggaggugugaucucacacucg

SEQ ID NO: 1619 - RNA, 21 nt, Artificial Sequence
  Synthetic oligonucleotide
  hsa-miR-6769b-3p MIMAT0027621
cccucucugucccacccauag

SEQ ID NO: 1620 - RNA, 23 nt, Artificial Sequence
  Synthetic oligonucleotide
  hsa-miR-7106-3p MIMAT0028110
agcucccugaaucccugucccag

SEQ ID NO: 1621 - RNA, 22 nt, Artificial Sequence
  Synthetic oligonucleotide
  hsa-miR-10a-3p MIMAT0004555
caaauucguaucuaggggaaua

SEQ ID NO: 1622 - RNA, 21 nt, Artificial Sequence
  Synthetic oligonucleotide
  hsa-miR-6815-3p MIMAT0027531
uggcuucucuugcacacccag

SEQ ID NO: 1623 - RNA, 20 nt, Artificial Sequence
  Synthetic oligonucleotide
  hsa-miR-6088 MIMAT0023713
agagaugaagcgggggggcg

SEQ ID NO: 1624 - RNA, 22 nt, Artificial Sequence
  Synthetic oligonucleotide
  hsa-miR-1-3p MIMAT0000416
uggaauguaaagaaguauguau

SEQ ID NO: 1625 - RNA, 22 nt, Artificial Sequence
  Synthetic oligonucleotide
  hsa-miR-200a-5p MIMAT0001620
caucuuaccggacagugcugga

SEQ ID NO: 1626 - RNA, 22 nt, Artificial Sequence
  Synthetic oligonucleotide
  hsa-miR-3202 MIMAT0015089
uggaagggagaagagcuuuaau

SEQ ID NO: 1627 - RNA, 22 nt, Artificial Sequence
  Synthetic oligonucleotide
  hsa-miR-6833-5p MIMAT0027566
guguggaagaugggaggagaaa

SEQ ID NO: 1628 - RNA, 21 nt, Artificial Sequence
  Synthetic oligonucleotide
  hsa-miR-943 MIMAT0004986
cugacuguugccguccuccag

SEQ ID NO: 1629 - RNA, 22 nt, Artificial Sequence
  Synthetic oligonucleotide
  hsa-miR-6883-5p MIMAT0027666
agggagggugugguauggaugu

SEQ ID NO: 1630 - RNA, 20 nt, Artificial Sequence
  Synthetic oligonucleotide
  hsa-miR-6890-3p MIMAT0027681
ccacugccuaugccccacag

SEQ ID NO: 1631 - RNA, 22 nt, Artificial Sequence
  Synthetic oligonucleotide
  hsa-let-7b-3p MIMAT0004482
cuauacaaccuacugccuuccc

SEQ ID NO: 1632 - RNA, 23 nt, Artificial Sequence
  Synthetic oligonucleotide
  hsa-miR-3149 MIMAT0015022
uuuguauggauauguguguguau

SEQ ID NO: 1633 - RNA, 23 nt, Artificial Sequence
  Synthetic oligonucleotide
  hsa-miR-6878-5p MIMAT0027656
agggagaaagcuagaagcugaag

SEQ ID NO: 1634 - RNA, 22 nt, Artificial Sequence
  Synthetic oligonucleotide
  hsa-miR-146b-3p MIMAT0004766
ugcccuguggacucaguucugg

SEQ ID NO: 1635 - RNA, 22 nt, Artificial Sequence
  Synthetic oligonucleotide
  hsa-miR-4731-5p MIMAT0019853
ugcugggggccacaugagugug

SEQ ID NO: 1636 - RNA, 21 nt, Artificial Sequence
  Synthetic oligonucleotide
  hsa-let-7g-3p MIMAT0004584
cuguacaggccacugccuugc

SEQ ID NO: 1637 - RNA, 21 nt, Artificial Sequence
  Synthetic oligonucleotide
  hsa-miR-5590-5p MIMAT0022299
uugccauacauagacuuuauu

SEQ ID NO: 1638 - RNA, 22 nt, Artificial Sequence
  Synthetic oligonucleotide
  hsa-miR-551b-5p MIMAT0004794
gaaaucaagcgugggugagacc

SEQ ID NO: 1639 - RNA, 23 nt, Artificial Sequence
  Synthetic oligonucleotide
  hsa-miR-302a-5p MIMAT0000683
acuuaaacguggauguacuugcu

SEQ ID NO: 1640 - RNA, 22 nt, Artificial Sequence
  Synthetic oligonucleotide
  hsa-miR-769-5p MIMAT0003886
ugagaccucuggguucugagcu

SEQ ID NO: 1641 - RNA, 21 nt, Artificial Sequence
  Synthetic oligonucleotide
  hsa-miR-3186-3p MIMAT0015068
ucacgcggagagauggcuuug

SEQ ID NO: 1642 - RNA, 23 nt, Artificial Sequence
  Synthetic oligonucleotide
  hsa-miR-19a-3p MIMAT0000073
ugugcaaaucuaugcaaaacuga

SEQ ID NO: 1643 - RNA, 22 nt, Artificial Sequence
  Synthetic oligonucleotide
  hsa-miR-381-5p MIMAT0022862
agcgagguugcccuuuguauau

SEQ ID NO: 1644 - RNA, 22 nt, Artificial Sequence
  Synthetic oligonucleotide
  hsa-miR-6741-3p MIMAT0027384
ucggcucucucccucacccuag

SEQ ID NO: 1645 - RNA, 19 nt, Artificial Sequence
  Synthetic oligonucleotide
  hsa-miR-7155-5p MIMAT0028220
ucuggggucuugggccauc

SEQ ID NO: 1646 - DNA, 19 bp, Artificial Sequence
  Synthetic oligonucleotide
  hsa-miR-6845-5p MIMAT0027590
cggggccagagcagagagc

SEQ ID NO: 1647 - RNA, 22 nt, Artificial Sequence
  Synthetic oligonucleotide
  hsa-miR-544b MIMAT0015004
accugagguugugcauuucuaa

SEQ ID NO: 1648 - RNA, 18 nt, Artificial Sequence
  Synthetic oligonucleotide
  hsa-miR-4505 MIMAT0019041
aggcugggcugggacgga

SEQ ID NO: 1649 - RNA, 22 nt, Artificial Sequence
  Synthetic oligonucleotide
  hsa-miR-8073 MIMAT0031000
accuggcagcagggagcgucgu

SEQ ID NO: 1650 - RNA, 22 nt, Artificial Sequence
  Synthetic oligonucleotide
  hsa-miR-4633-3p MIMAT0019690
aggagcuagccaggcauaugca

SEQ ID NO: 1651 - RNA, 22 nt, Artificial Sequence
  Synthetic oligonucleotide
  hsa-miR-4694-5p MIMAT0019786
agguguuauccuauccauuugc

SEQ ID NO: 1652 - RNA, 22 nt, Artificial Sequence
  Synthetic oligonucleotide
  hsa-miR-3677-5p MIMAT0019221
caguggccagagcccugcagug

SEQ ID NO: 1653 - RNA, 23 nt, Artificial Sequence
  Synthetic oligonucleotide
  hsa-miR-7848-3p MIMAT0030423
cuacccucggucugcuuaccaca

SEQ ID NO: 1654 - RNA, 22 nt, Artificial Sequence
  Synthetic oligonucleotide
  hsa-miR-4491 MIMAT0019026
aauguggacuggugugaccaaa

SEQ ID NO: 1655 - RNA, 23 nt, Artificial Sequence
  Synthetic oligonucleotide
  hsa-miR-668-3p MIMAT0003881
ugucacucggcucggcccacuac

SEQ ID NO: 1656 - RNA, 22 nt, Artificial Sequence
  Synthetic oligonucleotide
  hsa-miR-938 MIMAT0004981
ugcccuuaaaggugaacccagu

SEQ ID NO: 1657 - RNA, 22 nt, Artificial Sequence
  Synthetic oligonucleotide
  hsa-miR-3074-3p MIMAT0015027
gauaucagcucaguaggcaccg

SEQ ID NO: 1658 - RNA, 22 nt, Artificial Sequence
  Synthetic oligonucleotide
  hsa-miR-6716-3p MIMAT0025845
uccgaacucuccauuccucugc

SEQ ID NO: 1659 - RNA, 23 nt, Artificial Sequence
  Synthetic oligonucleotide
  hsa-miR-342-3p MIMAT0000753
ucucacacagaaaucgcacccgu

SEQ ID NO: 1660 - RNA, 22 nt, Artificial Sequence
  Synthetic oligonucleotide
  hsa-miR-584-5p MIMAT0003249
uuaugguuugccugggacugag

SEQ ID NO: 1661 - RNA, 18 nt, Artificial Sequence
  Synthetic oligonucleotide
  hsa-miR-5587-5p MIMAT0022289
auggucaccuccgggacu

SEQ ID NO: 1662 - RNA, 24 nt, Artificial Sequence
  Synthetic oligonucleotide
  hsa-miR-298 MIMAT0004901
agcagaagcagggagguucuccca

SEQ ID NO: 1663 - RNA, 23 nt, Artificial Sequence
  Synthetic oligonucleotide
  hsa-miR-8055 MIMAT0030982
cuuugagcacaugagcagacgga

SEQ ID NO: 1664 - RNA, 22 nt, Artificial Sequence
  Synthetic oligonucleotide
  hsa-miR-3612 MIMAT0017989
aggaggcaucuugagaaaugga

SEQ ID NO: 1665 - RNA, 23 nt, Artificial Sequence
  Synthetic oligonucleotide
  hsa-miR-542-5p MIMAT0003340
ucggggaucaucaugucacgaga

SEQ ID NO: 1666 - RNA, 23 nt, Artificial Sequence
  Synthetic oligonucleotide
  hsa-miR-19b-3p MIMAT0000074
ugugcaaauccaugcaaaacuga

SEQ ID NO: 1667 - RNA, 20 nt, Artificial Sequence
  Synthetic oligonucleotide
  hsa-miR-1231 MIMAT0005586
gugucugggcggacagcugc

SEQ ID NO: 1668 - RNA, 17 nt, Artificial Sequence
  Synthetic oligonucleotide
  hsa-miR-4255 MIMAT0016885
caguguucagagaugga

SEQ ID NO: 1669 - RNA, 23 nt, Artificial Sequence
  Synthetic oligonucleotide
  hsa-miR-675-5p MIMAT0004284
uggugcggagagggcccacagug

SEQ ID NO: 1670 - RNA, 23 nt, Artificial Sequence
  Synthetic oligonucleotide
  hsa-miR-199a-5p MIMAT0000231
cccaguguucagacuaccuguuc

SEQ ID NO: 1671 - RNA, 22 nt, Artificial Sequence
  Synthetic oligonucleotide
  hsa-miR-513b-5p MIMAT0005788
uucacaaggaggugucauuuau

SEQ ID NO: 1672 - RNA, 17 nt, Artificial Sequence
  Synthetic oligonucleotide
  hsa-miR-4455 MIMAT0018977
aggguguguguguuuuu

SEQ ID NO: 1673 - RNA, 21 nt, Artificial Sequence
  Synthetic oligonucleotide
  hsa-miR-3682-3p MIMAT0018110
ugaugauacagguggagguag

SEQ ID NO: 1674 - RNA, 19 nt, Artificial Sequence
  Synthetic oligonucleotide
  hsa-miR-9500 MIMAT0035542
aagggaagauggugaccac

SEQ ID NO: 1675 - RNA, 22 nt, Artificial Sequence
  Synthetic oligonucleotide
  hsa-miR-6828-5p MIMAT0027556
aggaagcaagagaacccugugg

SEQ ID NO: 1676 - RNA, 21 nt, Artificial Sequence
  Synthetic oligonucleotide
  hsa-miR-6718-5p MIMAT0025849
uaguggucagagggcuuauga

SEQ ID NO: 1677 - RNA, 21 nt, Artificial Sequence
  Synthetic oligonucleotide
  hsa-miR-939-3p MIMAT0022939
cccugggccucugcuccccag

SEQ ID NO: 1678 - RNA, 20 nt, Artificial Sequence
  Synthetic oligonucleotide
  hsa-miR-548ad-5p MIMAT0032114
aaaaguaauugugguuuuug

SEQ ID NO: 1679 - RNA, 23 nt, Artificial Sequence
  Synthetic oligonucleotide
  hsa-miR-339-3p MIMAT0004702
ugagcgccucgacgacagagccg

SEQ ID NO: 1680 - RNA, 22 nt, Artificial Sequence
  Synthetic oligonucleotide
  hsa-miR-630 MIMAT0003299
aguauucuguaccagggaaggu

SEQ ID NO: 1681 - RNA, 25 nt, Artificial Sequence
  Synthetic oligonucleotide
  hsa-miR-4739 MIMAT0019868
aagggaggaggagcggaggggcccu

SEQ ID NO: 1682 - RNA, 19 nt, Artificial Sequence
  Synthetic oligonucleotide
  hsa-miR-1246 MIMAT0005898
aauggauuuuuggagcagg

SEQ ID NO: 1683 - RNA, 23 nt, Artificial Sequence
  Synthetic oligonucleotide
  hsa-miR-600 MIMAT0003268
acuuacagacaagagccuugcuc

SEQ ID NO: 1684 - RNA, 22 nt, Artificial Sequence
  Synthetic oligonucleotide
  hsa-miR-3135b MIMAT0018985
ggcuggagcgagugcaguggug

SEQ ID NO: 1685 - RNA, 22 nt, Artificial Sequence
  Synthetic oligonucleotide
  hsa-miR-129-1-3p MIMAT0004548
aagcccuuaccccaaaaaguau

SEQ ID NO: 1686 - RNA, 21 nt, Artificial Sequence
  Synthetic oligonucleotide
  hsa-miR-4268 MIMAT0016896
ggcuccuccucucaggaugug

SEQ ID NO: 1687 - RNA, 22 nt, Artificial Sequence
  Synthetic oligonucleotide
  hsa-miR-876-5p MIMAT0004924
uggauuucuuugugaaucacca

SEQ ID NO: 1688 - RNA, 22 nt, Artificial Sequence
  Synthetic oligonucleotide
  hsa-miR-3145-5p MIMAT0019205
aacuccaaacacucaaaacuca

SEQ ID NO: 1689 - RNA, 23 nt, Artificial Sequence
  Synthetic oligonucleotide
  hsa-miR-582-5p MIMAT0003247
uuacaguuguucaaccaguuacu

SEQ ID NO: 1690 - RNA, 21 nt, Artificial Sequence
  Synthetic oligonucleotide
  hsa-miR-1470 MIMAT0007348
gcccuccgcccgugcaccccg

SEQ ID NO: 1691 - RNA, 18 nt, Artificial Sequence
  Synthetic oligonucleotide
  hsa-miR-4419b MIMAT0019034
gaggcugaaggaagaugg

SEQ ID NO: 1692 - RNA, 16 nt, Artificial Sequence
  Synthetic oligonucleotide
  hsa-miR-4291 MIMAT0016922
uucagcaggaacagcu

SEQ ID NO: 1693 - RNA, 22 nt, Artificial Sequence
  Synthetic oligonucleotide
  hsa-miR-766-5p MIMAT0022714
aggaggaauuggugcuggucuu

SEQ ID NO: 1694 - RNA, 20 nt, Artificial Sequence
  Synthetic oligonucleotide
  hsa-miR-548ae-5p MIMAT0032115
aaaaguaauugugguuuuug

SEQ ID NO: 1695 - RNA, 22 nt, Artificial Sequence
  Synthetic oligonucleotide
  hsa-miR-1271-3p MIMAT0022712
agugccugcuaugugccaggca

SEQ ID NO: 1696 - RNA, 23 nt, Artificial Sequence
  Synthetic oligonucleotide
  hsa-miR-200c-3p MIMAT0000617
uaauacugccggguaaugaugga

SEQ ID NO: 1697 - RNA, 21 nt, Artificial Sequence
  Synthetic oligonucleotide
  hsa-miR-549a MIMAT0003333
ugacaacuauggaugagcucu

SEQ ID NO: 1698 - RNA, 22 nt, Artificial Sequence
  Synthetic oligonucleotide
  hsa-miR-4721 MIMAT0019835
ugagggcuccaggugacggugg

SEQ ID NO: 1699 - RNA, 23 nt, Artificial Sequence
  Synthetic oligonucleotide
  hsa-miR-6810-5p MIMAT0027520
auggggacagggaucagcauggc

SEQ ID NO: 1700 - RNA, 24 nt, Artificial Sequence
  Synthetic oligonucleotide
  hsa-miR-6853-5p MIMAT0027606
agcgugggauguccaugaagucag

SEQ ID NO: 1701 - RNA, 23 nt, Artificial Sequence
  Synthetic oligonucleotide
  hsa-miR-4744 MIMAT0019875
ucuaaagacuagacuucgcuaug

SEQ ID NO: 1702 - RNA, 24 nt, Artificial Sequence
  Synthetic oligonucleotide
  hsa-miR-3670 MIMAT0018093
agagcucacagcuguccuucucua

SEQ ID NO: 1703 - RNA, 21 nt, Artificial Sequence
  Synthetic oligonucleotide
  hsa-miR-3925-3p MIMAT0019228
acuccaguuuuaguucucuug

SEQ ID NO: 1704 - RNA, 22 nt, Artificial Sequence
  Synthetic oligonucleotide
  hsa-miR-17-3p MIMAT0000071
acugcagugaaggcacuuguag

SEQ ID NO: 1705 - RNA, 22 nt, Artificial Sequence
  Synthetic oligonucleotide
  hsa-miR-4652-3p MIMAT0019717
guucuguuaacccauccccuca

SEQ ID NO: 1706 - RNA, 22 nt, Artificial Sequence
  Synthetic oligonucleotide
  hsa-miR-5585-5p MIMAT0022285
ugaaguaccagcuacucgagag

SEQ ID NO: 1707 - RNA, 22 nt, Artificial Sequence
  Synthetic oligonucleotide
  hsa-miR-196b-3p MIMAT0009201
ucgacagcacgacacugccuuc

SEQ ID NO: 1708 - RNA, 22 nt, Artificial Sequence
  Synthetic oligonucleotide
  hsa-miR-196a-3p MIMAT0004562
cggcaacaagaaacugccugag

SEQ ID NO: 1709 - RNA, 22 nt, Artificial Sequence
  Synthetic oligonucleotide
  hsa-miR-3200-3p MIMAT0015085
caccuugcgcuacucaggucug

SEQ ID NO: 1710 - RNA, 18 nt, Artificial Sequence
  Synthetic oligonucleotide
  hsa-miR-320e MIMAT0015072
aaagcuggguugagaagg

SEQ ID NO: 1711 - RNA, 21 nt, Artificial Sequence
  Synthetic oligonucleotide
  hsa-miR-4433a-5p MIMAT0020956
cgucccaccccccacuccugu

SEQ ID NO: 1712 - RNA, 21 nt, Artificial Sequence
  Synthetic oligonucleotide
  hsa-miR-4804-3p MIMAT0019985
ugcuuaaccuugcccucgaaa

SEQ ID NO: 1713 - RNA, 22 nt, Artificial Sequence
  Synthetic oligonucleotide
  hsa-miR-548ba MIMAT0031175
aaagguaacugugauuuuugcu

SEQ ID NO: 1714 - RNA, 22 nt, Artificial Sequence
  Synthetic oligonucleotide
  hsa-miR-3689a-3p MIMAT0018118
cugggaggugugauaucguggu

SEQ ID NO: 1715 - RNA, 22 nt, Artificial Sequence
  Synthetic oligonucleotide
  hsa-miR-548d-3p MIMAT0003323
caaaaaccacaguuucuuuugc

SEQ ID NO: 1716 - RNA, 23 nt, Artificial Sequence
  Synthetic oligonucleotide
  hsa-miR-8080 MIMAT0031007
gaaggacacuggugucaacggcu

SEQ ID NO: 1717 - RNA, 22 nt, Artificial Sequence
  Synthetic oligonucleotide
  hsa-miR-1912 MIMAT0007887
uacccagagcaugcagugugaa

SEQ ID NO: 1718 - RNA, 17 nt, Artificial Sequence
  Synthetic oligonucleotide
  hsa-miR-4316 MIMAT0016867
ggugaggcuagcuggug

SEQ ID NO: 1719 - RNA, 22 nt, Artificial Sequence
  Synthetic oligonucleotide
  hsa-miR-548az-5p MIMAT0025456
caaaagugauugugguuuuugc

SEQ ID NO: 1720 - RNA, 22 nt, Artificial Sequence
  Synthetic oligonucleotide
  hsa-miR-4690-5p MIMAT0019779
gagcaggcgaggcugggcugaa

SEQ ID NO: 1721 - RNA, 22 nt, Artificial Sequence
  Synthetic oligonucleotide
  hsa-miR-4717-5p MIMAT0019829
uaggccacagccacccaugugu

SEQ ID NO: 1722 - RNA, 22 nt, Artificial Sequence
  Synthetic oligonucleotide
  hsa-miR-3678-3p MIMAT0018103
cugcagaguuuguacggaccgg

SEQ ID NO: 1723 - RNA, 21 nt, Artificial Sequence
  Synthetic oligonucleotide
  hsa-miR-3194-5p MIMAT0015078
ggccagccaccaggagggcug

SEQ ID NO: 1724 - RNA, 22 nt, Artificial Sequence
  Synthetic oligonucleotide
  hsa-miR-605-3p MIMAT0026621
agaaggcacuaugagauuuaga

SEQ ID NO: 1725 - RNA, 22 nt, Artificial Sequence
  Synthetic oligonucleotide
  hsa-miR-3591-3p MIMAT0019877
aaacaccauugucacacuccac

SEQ ID NO: 1726 - RNA, 25 nt, Artificial Sequence
  Synthetic oligonucleotide
  hsa-miR-4706 MIMAT0019806
agcggggaggaagugggcgcugcuu

SEQ ID NO: 1727 - RNA, 22 nt, Artificial Sequence
  Synthetic oligonucleotide
  hsa-miR-4725-3p MIMAT0019844
uggggaaggcgucagugucggg

SEQ ID NO: 1728 - RNA, 20 nt, Artificial Sequence
  Synthetic oligonucleotide
  hsa-miR-4432 MIMAT0018948
aaagacucugcaagaugccu

SEQ ID NO: 1729 - RNA, 22 nt, Artificial Sequence
  Synthetic oligonucleotide
  hsa-miR-7849-3p MIMAT0030424
gacaauuguugaucuugggccu

SEQ ID NO: 1730 - RNA, 23 nt, Artificial Sequence
  Synthetic oligonucleotide
  hsa-miR-503-3p MIMAT0022925
gggguauuguuuccgcugccagg

SEQ ID NO: 1731 - RNA, 21 nt, Artificial Sequence
  Synthetic oligonucleotide
  hsa-miR-6731-3p MIMAT0027364
ucuauuccccacucuccccag

SEQ ID NO: 1732 - RNA, 22 nt, Artificial Sequence
  Synthetic oligonucleotide
  hsa-miR-1307-3p MIMAT0005951
acucggcguggcgucggucgug

SEQ ID NO: 1733 - RNA, 23 nt, Artificial Sequence
  Synthetic oligonucleotide
  hsa-miR-6859-3p MIMAT0027619
ugacccccaugucgccucuguag

SEQ ID NO: 1734 - RNA, 21 nt, Artificial Sequence
  Synthetic oligonucleotide
  hsa-miR-376a-3p MIMAT0000729
aucauagaggaaaauccacgu

SEQ ID NO: 1735 - RNA, 22 nt, Artificial Sequence
  Synthetic oligonucleotide
  hsa-miR-5000-5p MIMAT0021019
caguucagaaguguuccugagu

SEQ ID NO: 1736 - RNA, 23 nt, Artificial Sequence
  Synthetic oligonucleotide
  hsa-miR-3065-5p MIMAT0015066
ucaacaaaaucacugaugcugga

SEQ ID NO: 1737 - RNA, 24 nt, Artificial Sequence
  Synthetic oligonucleotide
  hsa-miR-6822-3p MIMAT0027545
aggcucuaacuggcuuucccugca

SEQ ID NO: 1738 - RNA, 22 nt, Artificial Sequence
  Synthetic oligonucleotide
  hsa-miR-8086 MIMAT0031013
ugcuagucuggacugauauggu

SEQ ID NO: 1739 - RNA, 22 nt, Artificial Sequence
  Synthetic oligonucleotide
  hsa-miR-125b-2-3p MIMAT0004603
ucacaagucaggcucuugggac

SEQ ID NO: 1740 - RNA, 22 nt, Artificial Sequence
  Synthetic oligonucleotide
  hsa-miR-548am-5p MIMAT0022740
aaaaguaauugcgguuuuugcc

SEQ ID NO: 1741 - RNA, 22 nt, Artificial Sequence
  Synthetic oligonucleotide
  hsa-miR-323b-3p MIMAT0015050
cccaauacacggucgaccucuu

SEQ ID NO: 1742 - RNA, 21 nt, Artificial Sequence
  Synthetic oligonucleotide
  hsa-miR-4489 MIMAT0019023
uggggcuagugaugcaggacg

SEQ ID NO: 1743 - RNA, 24 nt, Artificial Sequence
  Synthetic oligonucleotide
  hsa-miR-6862-3p MIMAT0027626
ccucacccagcucucuggcccucu

SEQ ID NO: 1744 - RNA, 22 nt, Artificial Sequence
  Synthetic oligonucleotide
  hsa-miR-194-3p MIMAT0004671
ccaguggggcugcuguuaucug

SEQ ID NO: 1745 - RNA, 22 nt, Artificial Sequence
  Synthetic oligonucleotide
  hsa-miR-6772-5p MIMAT0027444
uggguguaggcuggagcugagg

SEQ ID NO: 1746 - RNA, 22 nt, Artificial Sequence
  Synthetic oligonucleotide
  hsa-miR-223-5p MIMAT0004570
cguguauuugacaagcugaguu

SEQ ID NO: 1747 - RNA, 21 nt, Artificial Sequence
  Synthetic oligonucleotide
  hsa-miR-569 MIMAT0003234
aguuaaugaauccuggaaagu

SEQ ID NO: 1748 - RNA, 23 nt, Artificial Sequence
  Synthetic oligonucleotide
  hsa-miR-4680-5p MIMAT0019764
agaacucuugcagucuuagaugu

SEQ ID NO: 1749 - RNA, 22 nt, Artificial Sequence
  Synthetic oligonucleotide
  hsa-miR-1914-3p MIMAT0007890
ggaggggucccgcacugggagg

SEQ ID NO: 1750 - RNA, 22 nt, Artificial Sequence
  Synthetic oligonucleotide
  hsa-miR-4740-3p MIMAT0019870
gcccgagaggauccgucccugc

SEQ ID NO: 1751 - RNA, 22 nt, Artificial Sequence
  Synthetic oligonucleotide
  hsa-miR-518b MIMAT0002844
caaagcgcuccccuuuagaggu

SEQ ID NO: 1752 - RNA, 21 nt, Artificial Sequence
  Synthetic oligonucleotide
  hsa-miR-504-3p MIMAT0026612
gggagugcagggcaggguuuc

SEQ ID NO: 1753 - RNA, 21 nt, Artificial Sequence
  Synthetic oligonucleotide
  hsa-miR-149-3p MIMAT0004609
agggagggacgggggcugugc

SEQ ID NO: 1754 - RNA, 21 nt, Artificial Sequence
  Synthetic oligonucleotide
  hsa-miR-26b-5p MIMAT0000083
uucaaguaauucaggauaggu

SEQ ID NO: 1755 - RNA, 23 nt, Artificial Sequence
  Synthetic oligonucleotide
  hsa-miR-4758-5p MIMAT0019903
gugagugggagccgguggggcug

SEQ ID NO: 1756 - RNA, 20 nt, Artificial Sequence
  Synthetic oligonucleotide
  hsa-miR-5708 MIMAT0022502
augagcgacugugccugacc

SEQ ID NO: 1757 - RNA, 24 nt, Artificial Sequence
  Synthetic oligonucleotide
  hsa-miR-573 MIMAT0003238
cugaagugauguguaacugaucag

SEQ ID NO: 1758 - RNA, 21 nt, Artificial Sequence
  Synthetic oligonucleotide
  hsa-miR-670-3p MIMAT0026640
uuuccucauauucauucagga

SEQ ID NO: 1759 - RNA, 22 nt, Artificial Sequence
  Synthetic oligonucleotide
  hsa-miR-1236-3p MIMAT0005591
ccucuuccccuugucucuccag

SEQ ID NO: 1760 - RNA, 21 nt, Artificial Sequence
  Synthetic oligonucleotide
  hsa-miR-3912-5p MIMAT0027036
auguccauauuauggguuagu

SEQ ID NO: 1761 - RNA, 22 nt, Artificial Sequence
  Synthetic oligonucleotide
  hsa-miR-3686 MIMAT0018114
aucuguaagagaaaguaaauga

SEQ ID NO: 1762 - RNA, 21 nt, Artificial Sequence
  Synthetic oligonucleotide
  hsa-miR-4783-5p MIMAT0019946
ggcgcgcccagcucccgggcu

SEQ ID NO: 1763 - RNA, 21 nt, Artificial Sequence
  Synthetic oligonucleotide
  hsa-miR-660-3p MIMAT0022711
accuccugugugcauggauua

SEQ ID NO: 1764 - RNA, 21 nt, Artificial Sequence
  Synthetic oligonucleotide
  hsa-miR-3655 MIMAT0018075
gcuugucgcugcgguguugcu

SEQ ID NO: 1765 - RNA, 21 nt, Artificial Sequence
  Synthetic oligonucleotide
  hsa-miR-4720-3p MIMAT0019834
ugcuuaaguuguaccaaguau

SEQ ID NO: 1766 - RNA, 21 nt, Artificial Sequence
  Synthetic oligonucleotide
  hsa-miR-1202 MIMAT0005865
gugccagcugcagugggggag

SEQ ID NO: 1767 - RNA, 22 nt, Artificial Sequence
  Synthetic oligonucleotide
  hsa-miR-3160-5p MIMAT0019212
ggcuuucuagucucagcucucc

SEQ ID NO: 1768 - RNA, 21 nt, Artificial Sequence
  Synthetic oligonucleotide
  hsa-miR-765 MIMAT0003945
uggaggagaaggaaggugaug

SEQ ID NO: 1769 - RNA, 21 nt, Artificial Sequence
  Synthetic oligonucleotide
  hsa-miR-628-3p MIMAT0003297
ucuaguaagaguggcagucga

SEQ ID NO: 1770 - RNA, 24 nt, Artificial Sequence
  Synthetic oligonucleotide
  hsa-miR-3687 MIMAT0018115
cccggacaggcguucgugcgacgu

SEQ ID NO: 1771 - RNA, 22 nt, Artificial Sequence
  Synthetic oligonucleotide
  hsa-miR-532-5p MIMAT0002888
caugccuugaguguaggaccgu

SEQ ID NO: 1772 - RNA, 23 nt, Artificial Sequence
  Synthetic oligonucleotide
  hsa-miR-3131 MIMAT0014996
ucgaggacugguggaagggccuu

SEQ ID NO: 1773 - RNA, 21 nt, Artificial Sequence
  Synthetic oligonucleotide
  hsa-miR-296-5p MIMAT0000690
agggcccccccucaauccugu

SEQ ID NO: 1774 - RNA, 22 nt, Artificial Sequence
  Synthetic oligonucleotide
  hsa-miR-378a-5p MIMAT0000731
cuccugacuccagguccugugu

SEQ ID NO: 1775 - RNA, 21 nt, Artificial Sequence
  Synthetic oligonucleotide
  hsa-miR-6769a-3p MIMAT0027439
gagccccucucugcucuccag

SEQ ID NO: 1776 - RNA, 20 nt, Artificial Sequence
  Synthetic oligonucleotide
  hsa-miR-6802-5p MIMAT0027504
cuagguggggggcuugaagc

SEQ ID NO: 1777 - RNA, 23 nt, Artificial Sequence
  Synthetic oligonucleotide
  hsa-miR-1911-5p MIMAT0007885
ugaguaccgccaugucuguuggg

SEQ ID NO: 1778 - RNA, 19 nt, Artificial Sequence
  Synthetic oligonucleotide
  hsa-miR-6128 MIMAT0024611
acuggaauuggagucaaaa

SEQ ID NO: 1779 - RNA, 23 nt, Artificial Sequence
  Synthetic oligonucleotide
  hsa-miR-20a-5p MIMAT0000075
uaaagugcuuauagugcagguag

SEQ ID NO: 1780 - RNA, 22 nt, Artificial Sequence
  Synthetic oligonucleotide
  hsa-miR-5586-5p MIMAT0022287
uauccagcuuguuacuauaugc

SEQ ID NO: 1781 - RNA, 20 nt, Artificial Sequence
  Synthetic oligonucleotide
  hsa-miR-4790-5p MIMAT0019961
aucgcuuuaccauucauguu

SEQ ID NO: 1782 - RNA, 21 nt, Artificial Sequence
  Synthetic oligonucleotide
  hsa-miR-188-3p MIMAT0004613
cucccacaugcaggguuugca

SEQ ID NO: 1783 - RNA, 21 nt, Artificial Sequence
  Synthetic oligonucleotide
  hsa-miR-21-3p MIMAT0004494
caacaccagucgaugggcugu

SEQ ID NO: 1784 - RNA, 22 nt, Artificial Sequence
  Synthetic oligonucleotide
  hsa-miR-4654 MIMAT0019720
ugugggaucuggaggcaucugg

SEQ ID NO: 1785 - RNA, 23 nt, Artificial Sequence
  Synthetic oligonucleotide
  hsa-miR-6859-5p MIMAT0027618
gagaggaacaugggcucaggaca

SEQ ID NO: 1786 - RNA, 22 nt, Artificial Sequence
  Synthetic oligonucleotide
  hsa-miR-550b-2-5p MIMAT0022737
augugccugagggaguaagaca

SEQ ID NO: 1787 - RNA, 25 nt, Artificial Sequence
  Synthetic oligonucleotide
  hsa-miR-6782-5p MIMAT0027464
uaggggugggggaauucaggggugu

SEQ ID NO: 1788 - RNA, 22 nt, Artificial Sequence
  Synthetic oligonucleotide
  hsa-miR-4527 MIMAT0019066
uggucugcaaagagaugacugu

SEQ ID NO: 1789 - RNA, 21 nt, Artificial Sequence
  Synthetic oligonucleotide
  hsa-miR-2117 MIMAT0011162
uguucucuuugccaaggacag

SEQ ID NO: 1790 - RNA, 22 nt, Artificial Sequence
  Synthetic oligonucleotide
  hsa-miR-2355-3p MIMAT0017950
auuguccuugcuguuuggagau

SEQ ID NO: 1791 - RNA, 22 nt, Artificial Sequence
  Synthetic oligonucleotide
  hsa-miR-148b-3p MIMAT0000759
ucagugcaucacagaacuuugu

SEQ ID NO: 1792 - RNA, 21 nt, Artificial Sequence
  Synthetic oligonucleotide
  hsa-miR-6864-3p MIMAT0027629
gugagacuucucucccuucag

SEQ ID NO: 1793 - RNA, 21 nt, Artificial Sequence
  Synthetic oligonucleotide
  hsa-miR-590-3p MIMAT0004801
uaauuuuauguauaagcuagu

SEQ ID NO: 1794 - RNA, 22 nt, Artificial Sequence
  Synthetic oligonucleotide
  hsa-miR-100-5p MIMAT0000098
aacccguagauccgaacuugug

SEQ ID NO: 1795 - RNA, 23 nt, Artificial Sequence
  Synthetic oligonucleotide
  hsa-miR-548u MIMAT0015013
caaagacugcaauuacuuuugcg

SEQ ID NO: 1796 - RNA, 21 nt, Artificial Sequence
  Synthetic oligonucleotide
  hsa-miR-5589-5p MIMAT0022297
ggcugggugcucuugugcagu

SEQ ID NO: 1797 - RNA, 23 nt, Artificial Sequence
  Synthetic oligonucleotide
  hsa-miR-6837-3p MIMAT0027577
ccuucacugugacucugcugcag

SEQ ID NO: 1798 - RNA, 25 nt, Artificial Sequence
  Synthetic oligonucleotide
  hsa-miR-6774-5p MIMAT0027448
acuugggcaggagggacccuguaug

SEQ ID NO: 1799 - RNA, 18 nt, Artificial Sequence
  Synthetic oligonucleotide
  hsa-miR-4263 MIMAT0016898
auucuaagugccuuggcc

SEQ ID NO: 1800 - RNA, 24 nt, Artificial Sequence
  Synthetic oligonucleotide
  hsa-miR-8074 MIMAT0031001
cuauggcgagacuggcauguacuc

SEQ ID NO: 1801 - RNA, 21 nt, Artificial Sequence
  Synthetic oligonucleotide
  hsa-miR-6808-3p MIMAT0027517
gugugaccaccguuccugcag

SEQ ID NO: 1802 - RNA, 21 nt, Artificial Sequence
  Synthetic oligonucleotide
  hsa-miR-4666a-5p MIMAT0019741
auacaugucagauuguaugcc

SEQ ID NO: 1803 - RNA, 23 nt, Artificial Sequence
  Synthetic oligonucleotide
  hsa-miR-6743-3p MIMAT0027388
agccgcucuucucccugcccaca

SEQ ID NO: 1804 - RNA, 21 nt, Artificial Sequence
  Synthetic oligonucleotide
  hsa-miR-511-5p MIMAT0002808
gugucuuuugcucugcaguca

SEQ ID NO: 1805 - RNA, 23 nt, Artificial Sequence
  Synthetic oligonucleotide
  hsa-miR-4632-5p MIMAT0022977
gagggcagcguggguguggcgga

SEQ ID NO: 1806 - RNA, 23 nt, Artificial Sequence
  Synthetic oligonucleotide
  hsa-miR-301a-3p MIMAT0000688
cagugcaauaguauugucaaagc

SEQ ID NO: 1807 - RNA, 22 nt, Artificial Sequence
  Synthetic oligonucleotide
  hsa-miR-1200 MIMAT0005863
cuccugagccauucugagccuc

SEQ ID NO: 1808 - RNA, 23 nt, Artificial Sequence
  Synthetic oligonucleotide
  hsa-miR-3199 MIMAT0015084
agggacugccuuaggagaaaguu

SEQ ID NO: 1809 - RNA, 21 nt, Artificial Sequence
  Synthetic oligonucleotide
  hsa-miR-152-3p MIMAT0000438
ucagugcaugacagaacuugg

SEQ ID NO: 1810 - RNA, 22 nt, Artificial Sequence
  Synthetic oligonucleotide
  hsa-miR-361-5p MIMAT0000703
uuaucagaaucuccagggguac

SEQ ID NO: 1811 - RNA, 21 nt, Artificial Sequence
  Synthetic oligonucleotide
  hsa-miR-1199-3p MIMAT0031120
ugcggccggugcucaaccugc

SEQ ID NO: 1812 - RNA, 21 nt, Artificial Sequence
  Synthetic oligonucleotide
  hsa-miR-6751-3p MIMAT0027403
acugagccucucucucuccag

SEQ ID NO: 1813 - RNA, 22 nt, Artificial Sequence
  Synthetic oligonucleotide
  hsa-miR-6757-3p MIMAT0027415
aacacuggccuugcuaucccca

SEQ ID NO: 1814 - RNA, 22 nt, Artificial Sequence
  Synthetic oligonucleotide
  hsa-miR-6871-5p MIMAT0027642
caugggaguucggggugguugc

SEQ ID NO: 1815 - RNA, 21 nt, Artificial Sequence
  Synthetic oligonucleotide
  hsa-miR-656-3p MIMAT0003332
aauauuauacagucaaccucu

SEQ ID NO: 1816 - RNA, 23 nt, Artificial Sequence
  Synthetic oligonucleotide
  hsa-miR-4728-5p MIMAT0019849
ugggaggggagaggcagcaagca

SEQ ID NO: 1817 - RNA, 22 nt, Artificial Sequence
  Synthetic oligonucleotide
  hsa-miR-23c MIMAT0018000
aucacauugccagugauuaccc

SEQ ID NO: 1818 - RNA, 21 nt, Artificial Sequence
  Synthetic oligonucleotide
  hsa-miR-4717-3p MIMAT0019830
acacauggguggcuguggccu

SEQ ID NO: 1819 - RNA, 22 nt, Artificial Sequence
  Synthetic oligonucleotide
  hsa-miR-517c-3p MIMAT0002866
aucgugcauccuuuuagagugu

SEQ ID NO: 1820 - RNA, 22 nt, Artificial Sequence
  Synthetic oligonucleotide
  hsa-miR-520c-3p MIMAT0002846
aaagugcuuccuuuuagagggu

SEQ ID NO: 1821 - RNA, 24 nt, Artificial Sequence
  Synthetic oligonucleotide
  hsa-miR-6854-5p MIMAT0027608
aagcucagguuugagaacugcuga

SEQ ID NO: 1822 - RNA, 22 nt, Artificial Sequence
  Synthetic oligonucleotide
  hsa-miR-6849-3p MIMAT0027599
accagccuguguccaccuccag

SEQ ID NO: 1823 - RNA, 16 nt, Artificial Sequence
  Synthetic oligonucleotide
  hsa-miR-4310 MIMAT0016862
gcagcauucauguccc

SEQ ID NO: 1824 - RNA, 21 nt, Artificial Sequence
  Synthetic oligonucleotide
  hsa-miR-5591-5p MIMAT0022301
ugggagcuaagcuauggguau

SEQ ID NO: 1825 - RNA, 22 nt, Artificial Sequence
  Synthetic oligonucleotide
  hsa-miR-509-3p MIMAT0002881
ugauugguacgucuguggguag

SEQ ID NO: 1826 - RNA, 21 nt, Artificial Sequence
  Synthetic oligonucleotide
  hsa-miR-4277 MIMAT0016908
gcaguucugagcacaguacac

SEQ ID NO: 1827 - RNA, 22 nt, Artificial Sequence
  Synthetic oligonucleotide
  hsa-miR-4722-3p MIMAT0019837
accugccagcaccucccugcag

SEQ ID NO: 1828 - RNA, 22 nt, Artificial Sequence
  Synthetic oligonucleotide
  hsa-miR-6729-5p MIMAT0027359
ugggcgagggcggcugagcggc

SEQ ID NO: 1829 - RNA, 22 nt, Artificial Sequence
  Synthetic oligonucleotide
  hsa-miR-4496 MIMAT0019031
gaggaaacugaagcugagaggg

SEQ ID NO: 1830 - RNA, 22 nt, Artificial Sequence
  Synthetic oligonucleotide
  hsa-miR-4764-3p MIMAT0019915
uuaacuccuuucacacccaugg

SEQ ID NO: 1831 - RNA, 22 nt, Artificial Sequence
  Synthetic oligonucleotide
  hsa-miR-4782-5p MIMAT0019944
uucuggauaugaagacaaucaa

SEQ ID NO: 1832 - RNA, 22 nt, Artificial Sequence
  Synthetic oligonucleotide
  hsa-miR-708-3p MIMAT0004927
caacuagacugugagcuucuag

SEQ ID NO: 1833 - RNA, 22 nt, Artificial Sequence
  Synthetic oligonucleotide
  hsa-miR-1323 MIMAT0005795
ucaaaacugaggggcauuuucu

SEQ ID NO: 1834 - RNA, 22 nt, Artificial Sequence
  Synthetic oligonucleotide
  hsa-let-7i-5p MIMAT0000415
ugagguaguaguuugugcuguu

SEQ ID NO: 1835 - RNA, 20 nt, Artificial Sequence
  Synthetic oligonucleotide
  hsa-miR-384 MIMAT0001075
auuccuagaaauuguucaua

SEQ ID NO: 1836 - RNA, 18 nt, Artificial Sequence
  Synthetic oligonucleotide
  hsa-miR-4292 MIMAT0016919
ccccugggccggccuugg

SEQ ID NO: 1837 - RNA, 21 nt, Artificial Sequence
  Synthetic oligonucleotide
  hsa-miR-1273g-3p MIMAT0022742
accacugcacuccagccugag

SEQ ID NO: 1838 - RNA, 22 nt, Artificial Sequence
  Synthetic oligonucleotide
  hsa-miR-4699-3p MIMAT0019795
aauuuacucugcaaucuucucc

SEQ ID NO: 1839 - RNA, 20 nt, Artificial Sequence
  Synthetic oligonucleotide
  hsa-miR-500b-3p MIMAT0027032
gcacccaggcaaggauucug

SEQ ID NO: 1840 - RNA, 22 nt, Artificial Sequence
  Synthetic oligonucleotide
  hsa-miR-1252-5p MIMAT0005944
agaaggaaauugaauucauuua

SEQ ID NO: 1841 - RNA, 22 nt, Artificial Sequence
  Synthetic oligonucleotide
  hsa-miR-4802-5p MIMAT0019981
uauggagguucuagaccauguu

SEQ ID NO: 1842 - RNA, 22 nt, Artificial Sequence
  Synthetic oligonucleotide
  hsa-miR-4509 MIMAT0019046
acuaaaggauauagaagguuuu

SEQ ID NO: 1843 - DNA, 19 bp, Artificial Sequence
  Synthetic oligonucleotide
  hsa-miR-6090 MIMAT0023715
ggggagcgaggggcggggc

SEQ ID NO: 1844 - RNA, 22 nt, Artificial Sequence
  Synthetic oligonucleotide
  hsa-miR-654-3p MIMAT0004814
uaugucugcugaccaucaccuu

SEQ ID NO: 1845 - RNA, 22 nt, Artificial Sequence
  Synthetic oligonucleotide
  hsa-miR-4679 MIMAT0019763
ucugugauagagauucuuugcu

SEQ ID NO: 1846 - RNA, 22 nt, Artificial Sequence
  Synthetic oligonucleotide
  hsa-miR-429 MIMAT0001536
uaauacugucugguaaaaccgu

SEQ ID NO: 1847 - RNA, 22 nt, Artificial Sequence
  Synthetic oligonucleotide
  hsa-miR-584-3p MIMAT0022708
ucaguuccaggccaaccaggcu

SEQ ID NO: 1848 - RNA, 23 nt, Artificial Sequence
  Synthetic oligonucleotide
  hsa-miR-508-3p MIMAT0002880
ugauuguagccuuuuggaguaga

SEQ ID NO: 1849 - RNA, 22 nt, Artificial Sequence
  Synthetic oligonucleotide
  hsa-miR-4655-5p MIMAT0019721
caccggggauggcagagggucg

SEQ ID NO: 1850 - RNA, 22 nt, Artificial Sequence
  Synthetic oligonucleotide
  hsa-miR-6808-5p MIMAT0027516
caggcagggaggugggaccaug

SEQ ID NO: 1851 - RNA, 21 nt, Artificial Sequence
  Synthetic oligonucleotide
  hsa-miR-4762-5p MIMAT0019910
ccaaaucuugaucagaagccu

SEQ ID NO: 1852 - RNA, 21 nt, Artificial Sequence
  Synthetic oligonucleotide
  hsa-miR-6837-5p MIMAT0027576
accagggccagcagggaaugu

SEQ ID NO: 1853 - RNA, 22 nt, Artificial Sequence
  Synthetic oligonucleotide
  hsa-miR-200b-5p MIMAT0004571
caucuuacugggcagcauugga

SEQ ID NO: 1854 - RNA, 20 nt, Artificial Sequence
  Synthetic oligonucleotide
  hsa-miR-6801-3p MIMAT0027503
accccugccacucacuggcc

SEQ ID NO: 1855 - RNA, 22 nt, Artificial Sequence
  Synthetic oligonucleotide
  hsa-miR-548d-5p MIMAT0004812
aaaaguaauugugguuuuugcc

SEQ ID NO: 1856 - RNA, 22 nt, Artificial Sequence
  Synthetic oligonucleotide
  hsa-miR-3157-3p MIMAT0019210
cugcccuagucuagcugaagcu

SEQ ID NO: 1857 - RNA, 23 nt, Artificial Sequence
  Synthetic oligonucleotide
  hsa-miR-324-5p MIMAT0000761
cgcauccccuagggcauuggugu

SEQ ID NO: 1858 - RNA, 22 nt, Artificial Sequence
  Synthetic oligonucleotide
  hsa-miR-26a-1-3p MIMAT0004499
ccuauucuugguuacuugcacg

SEQ ID NO: 1859 - RNA, 20 nt, Artificial Sequence
  Synthetic oligonucleotide
  hsa-miR-3713 MIMAT0018164
gguauccguuuggggauggu

SEQ ID NO: 1860 - RNA, 21 nt, Artificial Sequence
  Synthetic oligonucleotide
  hsa-miR-4280 MIMAT0016911
gaguguaguucugagcagagc

SEQ ID NO: 1861 - RNA, 22 nt, Artificial Sequence
  Synthetic oligonucleotide
  hsa-miR-6743-5p MIMAT0027387
aaggggcagggacggguggccc

SEQ ID NO: 1862 - RNA, 25 nt, Artificial Sequence
  Synthetic oligonucleotide
  hsa-miR-6855-5p MIMAT0027610
uugggguuuggggugcagacauugc

SEQ ID NO: 1863 - RNA, 22 nt, Artificial Sequence
  Synthetic oligonucleotide
  hsa-miR-1294 MIMAT0005884
ugugagguuggcauuguugucu

SEQ ID NO: 1864 - RNA, 22 nt, Artificial Sequence
  Synthetic oligonucleotide
  hsa-miR-5696 MIMAT0022489
cucauuuaaguagucugaugcc

SEQ ID NO: 1865 - RNA, 24 nt, Artificial Sequence
  Synthetic oligonucleotide
  hsa-miR-7158-5p MIMAT0028226
ggcucaaucucugguccugcagcc

SEQ ID NO: 1866 - RNA, 25 nt, Artificial Sequence
  Synthetic oligonucleotide
  hsa-miR-548aa MIMAT0018447
aaaaaccacaauuacuuuugcacca

SEQ ID NO: 1867 - RNA, 22 nt, Artificial Sequence
  Synthetic oligonucleotide
  hsa-miR-3157-5p MIMAT0015031
uucagccaggcuagugcagucu

SEQ ID NO: 1868 - RNA, 22 nt, Artificial Sequence
  Synthetic oligonucleotide
  hsa-miR-154-3p MIMAT0000453
aaucauacacgguugaccuauu

SEQ ID NO: 1869 - RNA, 22 nt, Artificial Sequence
  Synthetic oligonucleotide
  hsa-miR-122-3p MIMAT0004590
aacgccauuaucacacuaaaua

SEQ ID NO: 1870 - RNA, 23 nt, Artificial Sequence
  Synthetic oligonucleotide
  hsa-miR-1270 MIMAT0005924
cuggagauauggaagagcugugu

SEQ ID NO: 1871 - RNA, 23 nt, Artificial Sequence
  Synthetic oligonucleotide
  hsa-miR-769-3p MIMAT0003887
cugggaucuccggggucuugguu

SEQ ID NO: 1872 - RNA, 17 nt, Artificial Sequence
  Synthetic oligonucleotide
  hsa-miR-3168 MIMAT0015043
gaguucuacagucagac

SEQ ID NO: 1873 - RNA, 21 nt, Artificial Sequence
  Synthetic oligonucleotide
  hsa-miR-143-3p MIMAT0000435
ugagaugaagcacuguagcuc

SEQ ID NO: 1874 - RNA, 23 nt, Artificial Sequence
  Synthetic oligonucleotide
  hsa-miR-6874-5p MIMAT0027648
auggagcuggaaccagaucaggc

SEQ ID NO: 1875 - RNA, 18 nt, Artificial Sequence
  Synthetic oligonucleotide
  hsa-miR-516b-3p MIMAT0002860
ugcuuccuuucagagggu

SEQ ID NO: 1876 - RNA, 23 nt, Artificial Sequence
  Synthetic oligonucleotide
  hsa-miR-10b-5p MIMAT0000254
uacccuguagaaccgaauuugug

SEQ ID NO: 1877 - RNA, 22 nt, Artificial Sequence
  Synthetic oligonucleotide
  hsa-miR-4677-5p MIMAT0019760
uuguucuuuggucuuucagcca

SEQ ID NO: 1878 - RNA, 23 nt, Artificial Sequence
  Synthetic oligonucleotide
  hsa-miR-7705 MIMAT0030020
aauagcucagaaugucaguucug

SEQ ID NO: 1879 - RNA, 22 nt, Artificial Sequence
  Synthetic oligonucleotide
  hsa-miR-6847-3p MIMAT0027595
ggcucaugugucuguccucuuc

SEQ ID NO: 1880 - RNA, 22 nt, Artificial Sequence
  Synthetic oligonucleotide
  hsa-miR-6755-5p MIMAT0027410
uaggguagacacugacaacguu

SEQ ID NO: 1881 - RNA, 22 nt, Artificial Sequence
  Synthetic oligonucleotide
  hsa-miR-512-3p MIMAT0002823
aagugcugucauagcugagguc

SEQ ID NO: 1882 - RNA, 22 nt, Artificial Sequence
  Synthetic oligonucleotide
  hsa-miR-153-3p MIMAT0000439
uugcauagucacaaaagugauc

SEQ ID NO: 1883 - RNA, 20 nt, Artificial Sequence
  Synthetic oligonucleotide
  hsa-miR-4454 MIMAT0018976
ggauccgagucacggcacca

SEQ ID NO: 1884 - RNA, 20 nt, Artificial Sequence
  Synthetic oligonucleotide
  hsa-miR-8064 MIMAT0030991
agcacacugagcgagcggac

SEQ ID NO: 1885 - RNA, 22 nt, Artificial Sequence
  Synthetic oligonucleotide
  hsa-miR-7110-3p MIMAT0028118
ucucucucccacuucccugcag

SEQ ID NO: 1886 - RNA, 23 nt, Artificial Sequence
  Synthetic oligonucleotide
  hsa-miR-423-3p MIMAT0001340
agcucggucugaggccccucagu

SEQ ID NO: 1887 - RNA, 22 nt, Artificial Sequence
  Synthetic oligonucleotide
  hsa-miR-331-5p MIMAT0004700
cuagguauggucccagggaucc

SEQ ID NO: 1888 - RNA, 21 nt, Artificial Sequence
  Synthetic oligonucleotide
  hsa-miR-190a-3p MIMAT0026482
cuauauaucaaacauauuccu

SEQ ID NO: 1889 - RNA, 21 nt, Artificial Sequence
  Synthetic oligonucleotide
  hsa-miR-610 MIMAT0003278
ugagcuaaaugugugcuggga

SEQ ID NO: 1890 - RNA, 22 nt, Artificial Sequence
  Synthetic oligonucleotide
  hsa-miR-198 MIMAT0000228
gguccagaggggagauagguuc

SEQ ID NO: 1891 - RNA, 21 nt, Artificial Sequence
  Synthetic oligonucleotide
  hsa-miR-4536-5p MIMAT0019078
ugugguagauauaugcacgau

SEQ ID NO: 1892 - RNA, 22 nt, Artificial Sequence
  Synthetic oligonucleotide
  hsa-miR-4760-5p MIMAT0019906
uuuagauugaacaugaaguuag

SEQ ID NO: 1893 - RNA, 22 nt, Artificial Sequence
  Synthetic oligonucleotide
  hsa-miR-3924 MIMAT0018199
auauguauaugugacugcuacu

SEQ ID NO: 1894 - RNA, 20 nt, Artificial Sequence
  Synthetic oligonucleotide
  hsa-miR-5692b MIMAT0022497
aauaauaucacaguaggugu

SEQ ID NO: 1895 - RNA, 22 nt, Artificial Sequence
  Synthetic oligonucleotide
  hsa-miR-6742-5p MIMAT0027385
aguggggugggacccagcuguu

SEQ ID NO: 1896 - RNA, 25 nt, Artificial Sequence
  Synthetic oligonucleotide
  hsa-miR-612 MIMAT0003280
gcugggcagggcuucugagcuccuu

SEQ ID NO: 1897 - RNA, 23 nt, Artificial Sequence
  Synthetic oligonucleotide
  hsa-miR-935 MIMAT0004978
ccaguuaccgcuuccgcuaccgc

SEQ ID NO: 1898 - RNA, 24 nt, Artificial Sequence
  Synthetic oligonucleotide
  hsa-miR-8089 MIMAT0031016
ccuggggacaggggauuggggcag

SEQ ID NO: 1899 - RNA, 21 nt, Artificial Sequence
  Synthetic oligonucleotide
  hsa-miR-6774-3p MIMAT0027449
ucgugucccucuuguccacag

SEQ ID NO: 1900 - RNA, 22 nt, Artificial Sequence
  Synthetic oligonucleotide
  hsa-miR-4503 MIMAT0019039
uuuaagcaggaaauagaauuua

SEQ ID NO: 1901 - RNA, 22 nt, Artificial Sequence
  Synthetic oligonucleotide
  hsa-miR-762 MIMAT0010313
ggggcuggggccggggccgagc

SEQ ID NO: 1902 - RNA, 22 nt, Artificial Sequence
  Synthetic oligonucleotide
  hsa-miR-150-3p MIMAT0004610
cugguacaggccugggggacag

SEQ ID NO: 1903 - RNA, 22 nt, Artificial Sequence
  Synthetic oligonucleotide
  hsa-miR-548aq-5p MIMAT0022263
gaaaguaauugcuguuuuugcc

SEQ ID NO: 1904 - RNA, 20 nt, Artificial Sequence
  Synthetic oligonucleotide
  hsa-miR-4999-3p MIMAT0021018
ucacuaccugacaauacagu

SEQ ID NO: 1905 - RNA, 21 nt, Artificial Sequence
  Synthetic oligonucleotide
  hsa-miR-3130-5p MIMAT0014995
uacccagucuccggugcagcc

SEQ ID NO: 1906 - RNA, 22 nt, Artificial Sequence
  Synthetic oligonucleotide
  hsa-miR-6883-3p MIMAT0027667
uucccuaucucacucuccucag

SEQ ID NO: 1907 - RNA, 22 nt, Artificial Sequence
  Synthetic oligonucleotide
  hsa-miR-497-3p MIMAT0004768
caaaccacacugugguguuaga

SEQ ID NO: 1908 - RNA, 22 nt, Artificial Sequence
  Synthetic oligonucleotide
  hsa-miR-3689c MIMAT0019007
cugggaggugugauauuguggu

SEQ ID NO: 1909 - RNA, 22 nt, Artificial Sequence
  Synthetic oligonucleotide
  hsa-miR-8082 MIMAT0031009
ugauggagcugggaauacucug

SEQ ID NO: 1910 - RNA, 22 nt, Artificial Sequence
  Synthetic oligonucleotide
  hsa-miR-548bb-3p MIMAT0035704
caaaaaccauaguuacuuuugc

SEQ ID NO: 1911 - RNA, 22 nt, Artificial Sequence
  Synthetic oligonucleotide
  hsa-miR-6818-5p MIMAT0027536
uugugugaguacagagagcauc

SEQ ID NO: 1912 - RNA, 23 nt, Artificial Sequence
  Synthetic oligonucleotide
  hsa-miR-6506-5p MIMAT0025468
acugggaugucacugaauauggu

SEQ ID NO: 1913 - RNA, 18 nt, Artificial Sequence
  Synthetic oligonucleotide
  hsa-miR-4315 MIMAT0016866
ccgcuuucugagcuggac

SEQ ID NO: 1914 - RNA, 21 nt, Artificial Sequence
  Synthetic oligonucleotide
  hsa-miR-676-3p MIMAT0018204
cuguccuaagguuguugaguu

SEQ ID NO: 1915 - RNA, 22 nt, Artificial Sequence
  Synthetic oligonucleotide
  hsa-miR-6508-3p MIMAT0025473
ugggccaugcauuucuagaacu

SEQ ID NO: 1916 - RNA, 19 nt, Artificial Sequence
  Synthetic oligonucleotide
  hsa-miR-3181 MIMAT0015061
aucgggcccucggcgccgg

SEQ ID NO: 1917 - RNA, 22 nt, Artificial Sequence
  Synthetic oligonucleotide
  hsa-miR-3927-3p MIMAT0018202
cagguagauauuugauaggcau

SEQ ID NO: 1918 - RNA, 22 nt, Artificial Sequence
  Synthetic oligonucleotide
  hsa-miR-5193 MIMAT0021124
uccuccucuaccucaucccagu

SEQ ID NO: 1919 - RNA, 22 nt, Artificial Sequence
  Synthetic oligonucleotide
  hsa-miR-7843-5p MIMAT0030411
gagggcagagccagcuuccuga

SEQ ID NO: 1920 - RNA, 22 nt, Artificial Sequence
  Synthetic oligonucleotide
  hsa-miR-6781-3p MIMAT0027463
ugccucuuuuccacggccucag

SEQ ID NO: 1921 - RNA, 22 nt, Artificial Sequence
  Synthetic oligonucleotide
  hsa-miR-376b-3p MIMAT0002172
aucauagaggaaaauccauguu

SEQ ID NO: 1922 - RNA, 22 nt, Artificial Sequence
  Synthetic oligonucleotide
  hsa-miR-4259 MIMAT0016880
caguugggucuaggggucagga

SEQ ID NO: 1923 - RNA, 19 nt, Artificial Sequence
  Synthetic oligonucleotide
  hsa-miR-566 MIMAT0003230
gggcgccugugaucccaac

SEQ ID NO: 1924 - RNA, 20 nt, Artificial Sequence
  Synthetic oligonucleotide
  hsa-miR-371a-5p MIMAT0004687
acucaaacugugggggcacu

SEQ ID NO: 1925 - RNA, 22 nt, Artificial Sequence
  Synthetic oligonucleotide
  hsa-miR-548e-5p MIMAT0026736
caaaagcaaucgcgguuuuugc

SEQ ID NO: 1926 - RNA, 22 nt, Artificial Sequence
  Synthetic oligonucleotide
  hsa-miR-651-5p MIMAT0003321
uuuaggauaagcuugacuuuug

SEQ ID NO: 1927 - RNA, 22 nt, Artificial Sequence
  Synthetic oligonucleotide
  hsa-miR-422a MIMAT0001339
acuggacuuagggucagaaggc

SEQ ID NO: 1928 - RNA, 22 nt, Artificial Sequence
  Synthetic oligonucleotide
  hsa-miR-4642 MIMAT0019702
auggcaucguccccugguggcu

SEQ ID NO: 1929 - RNA, 21 nt, Artificial Sequence
  Synthetic oligonucleotide
  hsa-miR-4724-3p MIMAT0019842
guaccuucugguucagcuagu

SEQ ID NO: 1930 - RNA, 21 nt, Artificial Sequence
  Synthetic oligonucleotide
  hsa-miR-7160-3p MIMAT0028231
cagggcccuggcuuuagcaga

SEQ ID NO: 1931 - RNA, 19 nt, Artificial Sequence
  Synthetic oligonucleotide
  hsa-miR-6744-5p MIMAT0027389
uggaugacaguggaggccu

SEQ ID NO: 1932 - RNA, 22 nt, Artificial Sequence
  Synthetic oligonucleotide
  hsa-miR-4524a-3p MIMAT0019063
ugagacaggcuuaugcugcuau

SEQ ID NO: 1933 - RNA, 22 nt, Artificial Sequence
  Synthetic oligonucleotide
  hsa-miR-873-3p MIMAT0022717
ggagacugaugaguucccggga

SEQ ID NO: 1934 - RNA, 22 nt, Artificial Sequence
  Synthetic oligonucleotide
  hsa-miR-362-3p MIMAT0004683
aacacaccuauucaaggauuca

SEQ ID NO: 1935 - RNA, 23 nt, Artificial Sequence
  Synthetic oligonucleotide
  hsa-miR-4758-3p MIMAT0019904
ugccccaccugcugaccacccuc

SEQ ID NO: 1936 - RNA, 22 nt, Artificial Sequence
  Synthetic oligonucleotide
  hsa-miR-1263 MIMAT0005915
augguacccuggcauacugagu

SEQ ID NO: 1937 - RNA, 22 nt, Artificial Sequence
  Synthetic oligonucleotide
  hsa-miR-6512-3p MIMAT0025481
uuccagcccuucuaaugguagg

SEQ ID NO: 1938 - RNA, 20 nt, Artificial Sequence
  Synthetic oligonucleotide
  hsa-miR-6073 MIMAT0023698
gguagugaguuaucagcuac

SEQ ID NO: 1939 - RNA, 20 nt, Artificial Sequence
  Synthetic oligonucleotide
  hsa-miR-670-5p MIMAT0010357
gucccugaguguauguggug

SEQ ID NO: 1940 - RNA, 21 nt, Artificial Sequence
  Synthetic oligonucleotide
  hsa-miR-1257 MIMAT0005908
agugaaugauggguucugacc

SEQ ID NO: 1941 - RNA, 22 nt, Artificial Sequence
  Synthetic oligonucleotide
  hsa-miR-3911 MIMAT0018185
uguguggauccuggaggaggca

SEQ ID NO: 1942 - RNA, 20 nt, Artificial Sequence
  Synthetic oligonucleotide
  hsa-miR-4429 MIMAT0018944
aaaagcugggcugagaggcg

SEQ ID NO: 1943 - RNA, 23 nt, Artificial Sequence
  Synthetic oligonucleotide
  hsa-miR-4711-5p MIMAT0019816
ugcaucaggccagaagacaugag

SEQ ID NO: 1944 - RNA, 22 nt, Artificial Sequence
  Synthetic oligonucleotide
  hsa-miR-3646 MIMAT0018065
aaaaugaaaugagcccagccca

SEQ ID NO: 1945 - RNA, 19 nt, Artificial Sequence
  Synthetic oligonucleotide
  hsa-miR-6085 MIMAT0023710
aaggggcugggggagcaca

SEQ ID NO: 1946 - RNA, 22 nt, Artificial Sequence
  Synthetic oligonucleotide
  hsa-miR-4459 MIMAT0018981
ccaggaggcggaggagguggag

SEQ ID NO: 1947 - RNA, 22 nt, Artificial Sequence
  Synthetic oligonucleotide
  hsa-miR-4667-5p MIMAT0019743
acuggggagcagaaggagaacc

SEQ ID NO: 1948 - RNA, 22 nt, Artificial Sequence
  Synthetic oligonucleotide
  hsa-miR-146b-5p MIMAT0002809
ugagaacugaauuccauaggcu

SEQ ID NO: 1949 - RNA, 23 nt, Artificial Sequence
  Synthetic oligonucleotide
  hsa-miR-6730-5p MIMAT0027361
agaaagguggagggguugucaga

SEQ ID NO: 1950 - RNA, 22 nt, Artificial Sequence
  Synthetic oligonucleotide
  hsa-miR-378a-3p MIMAT0000732
acuggacuuggagucagaaggc

SEQ ID NO: 1951 - RNA, 19 nt, Artificial Sequence
  Synthetic oligonucleotide
  hsa-miR-3650 MIMAT0018070
aggugugucuguagagucc

SEQ ID NO: 1952 - RNA, 22 nt, Artificial Sequence
  Synthetic oligonucleotide
  hsa-miR-4798-3p MIMAT0019975
aacucacgaaguauaccgaagu

SEQ ID NO: 1953 - RNA, 22 nt, Artificial Sequence
  Synthetic oligonucleotide
  hsa-miR-4789-5p MIMAT0019959
guauacaccugauauguguaug

SEQ ID NO: 1954 - RNA, 23 nt, Artificial Sequence
  Synthetic oligonucleotide
  hsa-miR-4686 MIMAT0019773
uaucugcugggcuuucugguguu

SEQ ID NO: 1955 - RNA, 22 nt, Artificial Sequence
  Synthetic oligonucleotide
  hsa-miR-133b MIMAT0000770
uuugguccccuucaaccagcua

SEQ ID NO: 1956 - RNA, 22 nt, Artificial Sequence
  Synthetic oligonucleotide
  hsa-miR-548ah-3p MIMAT0020957
caaaaacugcaguuacuuuugc

SEQ ID NO: 1957 - RNA, 21 nt, Artificial Sequence
  Synthetic oligonucleotide
  hsa-miR-3663-5p MIMAT0018084
gcuggucugcguggugcucgg

SEQ ID NO: 1958 - RNA, 21 nt, Artificial Sequence
  Synthetic oligonucleotide
  hsa-miR-410-5p MIMAT0026558
agguugucugugaugaguucg

SEQ ID NO: 1959 - RNA, 25 nt, Artificial Sequence
  Synthetic oligonucleotide
  hsa-miR-4728-3p MIMAT0019850
caugcugaccucccuccugccccag

SEQ ID NO: 1960 - RNA, 22 nt, Artificial Sequence
  Synthetic oligonucleotide
  hsa-miR-15b-5p MIMAT0000417
uagcagcacaucaugguuuaca

SEQ ID NO: 1961 - RNA, 22 nt, Artificial Sequence
  Synthetic oligonucleotide
  hsa-miR-548q MIMAT0011163
gcuggugcaaaaguaauggcgg

SEQ ID NO: 1962 - RNA, 20 nt, Artificial Sequence
  Synthetic oligonucleotide
  hsa-miR-572 MIMAT0003237
guccgcucggcgguggccca

SEQ ID NO: 1963 - RNA, 19 nt, Artificial Sequence
  Synthetic oligonucleotide
  hsa-miR-4659b-5p MIMAT0019733
uugccaugucuaagaagaa

SEQ ID NO: 1964 - RNA, 22 nt, Artificial Sequence
  Synthetic oligonucleotide
  hsa-miR-4664-3p MIMAT0019738
cuuccggucugugagccccguc

SEQ ID NO: 1965 - RNA, 17 nt, Artificial Sequence
  Synthetic oligonucleotide
  hsa-miR-4478 MIMAT0019006
gaggcugagcugaggag

SEQ ID NO: 1966 - RNA, 20 nt, Artificial Sequence
  Synthetic oligonucleotide
  hsa-miR-4485-3p MIMAT0019019
uaacggccgcgguacccuaa

SEQ ID NO: 1967 - RNA, 21 nt, Artificial Sequence
  Synthetic oligonucleotide
  hsa-miR-3648 MIMAT0018068
agccgcggggaucgccgaggg

SEQ ID NO: 1968 - RNA, 19 nt, Artificial Sequence
  Synthetic oligonucleotide
  hsa-miR-4307 MIMAT0016860
aauguuuuuuccuguuucc

SEQ ID NO: 1969 - RNA, 24 nt, Artificial Sequence
  Synthetic oligonucleotide
  hsa-miR-6081 MIMAT0023706
aggagcagugccggccaaggcgcc

SEQ ID NO: 1970 - RNA, 20 nt, Artificial Sequence
  Synthetic oligonucleotide
  hsa-miR-937-5p MIMAT0022938
gugagucaggguggggcugg

SEQ ID NO: 1971 - RNA, 21 nt, Artificial Sequence
  Synthetic oligonucleotide
  hsa-miR-181d-3p MIMAT0026608
ccaccgggggaugaaugucac

SEQ ID NO: 1972 - RNA, 21 nt, Artificial Sequence
  Synthetic oligonucleotide
  hsa-miR-128-3p MIMAT0000424
ucacagugaaccggucucuuu

SEQ ID NO: 1973 - RNA, 20 nt, Artificial Sequence
  Synthetic oligonucleotide
  hsa-miR-6829-5p MIMAT0027558
ugggcugcugagaaggggca

SEQ ID NO: 1974 - RNA, 21 nt, Artificial Sequence
  Synthetic oligonucleotide
  hsa-miR-7856-5p MIMAT0030431
uuuuaaggacacugagggauc

SEQ ID NO: 1975 - RNA, 23 nt, Artificial Sequence
  Synthetic oligonucleotide
  hsa-miR-4756-5p MIMAT0019899
cagggaggcgcucacucucugcu

SEQ ID NO: 1976 - RNA, 22 nt, Artificial Sequence
  Synthetic oligonucleotide
  hsa-miR-3175 MIMAT0015052
cggggagagaacgcagugacgu

SEQ ID NO: 1977 - RNA, 21 nt, Artificial Sequence
  Synthetic oligonucleotide
  hsa-miR-3158-5p MIMAT0019211
ccugcagagaggaagcccuuc

SEQ ID NO: 1978 - RNA, 22 nt, Artificial Sequence
  Synthetic oligonucleotide
  hsa-miR-4632-3p MIMAT0019688
ugccgcccucucgcugcucuag

SEQ ID NO: 1979 - RNA, 21 nt, Artificial Sequence
  Synthetic oligonucleotide
  hsa-miR-1237-3p MIMAT0005592
uccuucugcuccgucccccag

SEQ ID NO: 1980 - RNA, 25 nt, Artificial Sequence
  Synthetic oligonucleotide
  hsa-miR-4517 MIMAT0019054
aaauaugaugaaacucacagcugag

SEQ ID NO: 1981 - RNA, 22 nt, Artificial Sequence
  Synthetic oligonucleotide
  hsa-miR-155-3p MIMAT0004658
cuccuacauauuagcauuaaca

SEQ ID NO: 1982 - RNA, 23 nt, Artificial Sequence
  Synthetic oligonucleotide
  hsa-miR-3128 MIMAT0014991
ucuggcaaguaaaaaacucucau

SEQ ID NO: 1983 - RNA, 18 nt, Artificial Sequence
  Synthetic oligonucleotide
  hsa-miR-1268a MIMAT0005922
cgggcguggugguggggg

SEQ ID NO: 1984 - RNA, 22 nt, Artificial Sequence
  Synthetic oligonucleotide
  hsa-miR-4661-3p MIMAT0019730
caggauccacagagcuagucca

SEQ ID NO: 1985 - RNA, 20 nt, Artificial Sequence
  Synthetic oligonucleotide
  hsa-miR-7152-3p MIMAT0028215
ucugguccuggacaggaggc

SEQ ID NO: 1986 - RNA, 20 nt, Artificial Sequence
  Synthetic oligonucleotide
  hsa-miR-6828-3p MIMAT0027557
aucugcucucuuguucccag

SEQ ID NO: 1987 - RNA, 20 nt, Artificial Sequence
  Synthetic oligonucleotide
  hsa-miR-8056 MIMAT0030983
cguggauugucuggaugcau

SEQ ID NO: 1988 - RNA, 18 nt, Artificial Sequence
  Synthetic oligonucleotide
  hsa-miR-4444 MIMAT0018962
cucgaguuggaagaggcg

SEQ ID NO: 1989 - RNA, 22 nt, Artificial Sequence
  Synthetic oligonucleotide
  hsa-miR-6838-5p MIMAT0027578
aagcagcaguggcaagacuccu

SEQ ID NO: 1990 - RNA, 22 nt, Artificial Sequence
  Synthetic oligonucleotide
  hsa-miR-6757-5p MIMAT0027414
uagggaugggaggccaggauga

SEQ ID NO: 1991 - RNA, 22 nt, Artificial Sequence
  Synthetic oligonucleotide
  hsa-miR-501-5p MIMAT0002872
aauccuuugucccugggugaga

SEQ ID NO: 1992 - RNA, 21 nt, Artificial Sequence
  Synthetic oligonucleotide
  hsa-miR-342-5p MIMAT0004694
aggggugcuaucugugauuga

SEQ ID NO: 1993 - RNA, 23 nt, Artificial Sequence
  Synthetic oligonucleotide
  hsa-miR-6758-5p MIMAT0027416
uagagaggggaaggaugugaugu

SEQ ID NO: 1994 - RNA, 23 nt, Artificial Sequence
  Synthetic oligonucleotide
  hsa-miR-1229-3p MIMAT0005584
cucucaccacugcccucccacag

SEQ ID NO: 1995 - RNA, 22 nt, Artificial Sequence
  Synthetic oligonucleotide
  hsa-miR-642a-3p MIMAT0020924
agacacauuuggagagggaacc

SEQ ID NO: 1996 - RNA, 22 nt, Artificial Sequence
  Synthetic oligonucleotide
  hsa-miR-1284 MIMAT0005941
ucuauacagacccuggcuuuuc

SEQ ID NO: 1997 - RNA, 24 nt, Artificial Sequence
  Synthetic oligonucleotide
  hsa-miR-1229-5p MIMAT0022942
guggguaggguuugggggagagcg

SEQ ID NO: 1998 - RNA, 23 nt, Artificial Sequence
  Synthetic oligonucleotide
  hsa-miR-3185 MIMAT0015065
agaagaaggcggucggucugcgg

SEQ ID NO: 1999 - RNA, 20 nt, Artificial Sequence
  Synthetic oligonucleotide
  hsa-miR-4270 MIMAT0016900
ucagggagucaggggagggc

SEQ ID NO: 2000 - RNA, 22 nt, Artificial Sequence
  Synthetic oligonucleotide
  hsa-miR-556-5p MIMAT0003220
gaugagcucauuguaauaugag

SEQ ID NO: 2001 - RNA, 22 nt, Artificial Sequence
  Synthetic oligonucleotide
  hsa-miR-4705 MIMAT0019805
ucaaucacuugguaauugcugu

SEQ ID NO: 2002 - RNA, 22 nt, Artificial Sequence
  Synthetic oligonucleotide
  hsa-miR-519a-5p MIMAT0005452
cucuagagggaagcgcuuucug

SEQ ID NO: 2003 - RNA, 22 nt, Artificial Sequence
  Synthetic oligonucleotide
  hsa-miR-5094 MIMAT0021086
aaucagugaaugccuugaaccu

SEQ ID NO: 2004 - RNA, 22 nt, Artificial Sequence
  Synthetic oligonucleotide
  hsa-miR-145-3p MIMAT0004601
ggauuccuggaaauacuguucu

SEQ ID NO: 2005 - RNA, 22 nt, Artificial Sequence
  Synthetic oligonucleotide
  hsa-miR-759 MIMAT0010497
gcagagugcaaacaauuuugac

SEQ ID NO: 2006 - RNA, 21 nt, Artificial Sequence
  Synthetic oligonucleotide
  hsa-miR-2116-5p MIMAT0011160
gguucuuagcauaggaggucu

SEQ ID NO: 2007 - RNA, 23 nt, Artificial Sequence
  Synthetic oligonucleotide
  hsa-miR-4741 MIMAT0019871
cgggcuguccggaggggucggcu

SEQ ID NO: 2008 - RNA, 24 nt, Artificial Sequence
  Synthetic oligonucleotide
  hsa-miR-6789-5p MIMAT0027478
guaggggcgucccgggcgcgcggg

SEQ ID NO: 2009 - RNA, 21 nt, Artificial Sequence
  Synthetic oligonucleotide
  hsa-miR-548t-5p MIMAT0015009
caaaagugaucgugguuuuug

SEQ ID NO: 2010 - RNA, 22 nt, Artificial Sequence
  Synthetic oligonucleotide
  hsa-miR-29c-3p MIMAT0000681
uagcaccauuugaaaucgguua

SEQ ID NO: 2011 - DNA, 22 bp, Artificial Sequence
  Synthetic oligonucleotide
  hsa-miR-483-5p MIMAT0004761
aagacgggaggaaagaagggag

SEQ ID NO: 2012 - RNA, 22 nt, Artificial Sequence
  Synthetic oligonucleotide
  hsa-let-7f-5p MIMAT0000067
ugagguaguagauuguauaguu

SEQ ID NO: 2013 - RNA, 21 nt, Artificial Sequence
  Synthetic oligonucleotide
  hsa-miR-1539 MIMAT0007401
uccugcgcgucccagaugccc

SEQ ID NO: 2014 - RNA, 22 nt, Artificial Sequence
  Synthetic oligonucleotide
  hsa-miR-6842-5p MIMAT0027586
uggggguggucucuagccaagg

SEQ ID NO: 2015 - RNA, 23 nt, Artificial Sequence
  Synthetic oligonucleotide
  hsa-miR-4745-5p MIMAT0019878
ugaguggggcucccgggacggcg

SEQ ID NO: 2016 - RNA, 22 nt, Artificial Sequence
  Synthetic oligonucleotide
  hsa-miR-7111-5p MIMAT0028119
ugggggaggaaggacaggccau

SEQ ID NO: 2017 - RNA, 22 nt, Artificial Sequence
  Synthetic oligonucleotide
  hsa-miR-3675-3p MIMAT0018099
caucucuaaggaacucccccaa

SEQ ID NO: 2018 - RNA, 22 nt, Artificial Sequence
  Synthetic oligonucleotide
  hsa-let-7d-5p MIMAT0000065
agagguaguagguugcauaguu

SEQ ID NO: 2019 - RNA, 22 nt, Artificial Sequence
  Synthetic oligonucleotide
  hsa-miR-3607-5p MIMAT0017984
gcaugugaugaagcaaaucagu

SEQ ID NO: 2020 - RNA, 22 nt, Artificial Sequence
  Synthetic oligonucleotide
  hsa-miR-30e-5p MIMAT0000692
uguaaacauccuugacuggaag

SEQ ID NO: 2021 - RNA, 21 nt, Artificial Sequence
  Synthetic oligonucleotide
  hsa-miR-555 MIMAT0003219
aggguaagcugaaccucugau

SEQ ID NO: 2022 - RNA, 22 nt, Artificial Sequence
  Synthetic oligonucleotide
  hsa-miR-1271-5p MIMAT0005796
cuuggcaccuagcaagcacuca

SEQ ID NO: 2023 - RNA, 23 nt, Artificial Sequence
  Synthetic oligonucleotide
  hsa-miR-18a-3p MIMAT0002891
acugcccuaagugcuccuucugg

SEQ ID NO: 2024 - RNA, 22 nt, Artificial Sequence
  Synthetic oligonucleotide
  hsa-miR-1255b-2-3p MIMAT0022725
aaccacuuucuuugcucaucca

SEQ ID NO: 2025 - RNA, 19 nt, Artificial Sequence
  Synthetic oligonucleotide
  hsa-miR-378b MIMAT0014999
acuggacuuggaggcagaa

SEQ ID NO: 2026 - RNA, 23 nt, Artificial Sequence
  Synthetic oligonucleotide
  hsa-miR-7161-5p MIMAT0028232
uaaagacuguagaggcaacuggu

SEQ ID NO: 2027 - RNA, 22 nt, Artificial Sequence
  Synthetic oligonucleotide
  hsa-miR-3915 MIMAT0018189
uugaggaaaagauggucuuauu

SEQ ID NO: 2028 - RNA, 22 nt, Artificial Sequence
  Synthetic oligonucleotide
  hsa-miR-5007-3p MIMAT0021036
aucauaugaaccaaacucuaau

SEQ ID NO: 2029 - RNA, 23 nt, Artificial Sequence
  Synthetic oligonucleotide
  hsa-miR-4462 MIMAT0018986
ugacacggaggguggcuugggaa

SEQ ID NO: 2030 - RNA, 22 nt, Artificial Sequence
  Synthetic oligonucleotide
  hsa-miR-6820-3p MIMAT0027541
ugugacuucuccccugccacag

SEQ ID NO: 2031 - RNA, 22 nt, Artificial Sequence
  Synthetic oligonucleotide
  hsa-miR-369-5p MIMAT0001621
agaucgaccguguuauauucgc

SEQ ID NO: 2032 - RNA, 22 nt, Artificial Sequence
  Synthetic oligonucleotide
  hsa-miR-4537 MIMAT0019080
ugagccgagcugagcuuagcug

SEQ ID NO: 2033 - RNA, 22 nt, Artificial Sequence
  Synthetic oligonucleotide
  hsa-miR-5704 MIMAT0022498
uuaggccaucaucccauuaugc

SEQ ID NO: 2034 - RNA, 22 nt, Artificial Sequence
  Synthetic oligonucleotide
  hsa-miR-4450 MIMAT0018971
uggggauuuggagaagugguga

SEQ ID NO: 2035 - RNA, 21 nt, Artificial Sequence
  Synthetic oligonucleotide
  hsa-miR-4321 MIMAT0016874
uuagcgguggaccgcccugcg

SEQ ID NO: 2036 - RNA, 22 nt, Artificial Sequence
  Synthetic oligonucleotide
  hsa-miR-4799-3p MIMAT0019977
acuggcaugcugcauuuauaua

SEQ ID NO: 2037 - RNA, 23 nt, Artificial Sequence
  Synthetic oligonucleotide
  hsa-miR-4745-3p MIMAT0019879
uggcccggcgacgucucacgguc

SEQ ID NO: 2038 - RNA, 21 nt, Artificial Sequence
  Synthetic oligonucleotide
  hsa-miR-4725-5p MIMAT0019843
agacccugcagccuucccacc

SEQ ID NO: 2039 - RNA, 22 nt, Artificial Sequence
  Synthetic oligonucleotide
  hsa-miR-6862-5p MIMAT0027625
cgggcaugcugggagagacuuu

SEQ ID NO: 2040 - RNA, 22 nt, Artificial Sequence
  Synthetic oligonucleotide
  hsa-miR-654-5p MIMAT0003330
uggugggccgcagaacaugugc

SEQ ID NO: 2041 - RNA, 22 nt, Artificial Sequence
  Synthetic oligonucleotide
  hsa-miR-99a-3p MIMAT0004511
caagcucgcuucuaugggucug

SEQ ID NO: 2042 - RNA, 19 nt, Artificial Sequence
  Synthetic oligonucleotide
  hsa-miR-626 MIMAT0003295
agcugucugaaaaugucuu

SEQ ID NO: 2043 - RNA, 21 nt, Artificial Sequence
  Synthetic oligonucleotide
  hsa-miR-130b-5p MIMAT0004680
acucuuucccuguugcacuac

SEQ ID NO: 2044 - RNA, 22 nt, Artificial Sequence
  Synthetic oligonucleotide
  hsa-miR-487a-5p MIMAT0026559
gugguuaucccugcuguguucg

SEQ ID NO: 2045 - RNA, 23 nt, Artificial Sequence
  Synthetic oligonucleotide
  hsa-miR-6799-3p MIMAT0027499
ugcccugcaugguguccccacag

SEQ ID NO: 2046 - RNA, 23 nt, Artificial Sequence
  Synthetic oligonucleotide
  hsa-miR-3064-3p MIMAT0019865
uugccacacugcaacaccuuaca

SEQ ID NO: 2047 - RNA, 20 nt, Artificial Sequence
  Synthetic oligonucleotide
  hsa-miR-6726-3p MIMAT0027354
cucgcccugucucccgcuag

SEQ ID NO: 2048 - RNA, 21 nt, Artificial Sequence
  Synthetic oligonucleotide
  hsa-miR-548au-3p MIMAT0022292
uggcaguuacuuuugcaccag

SEQ ID NO: 2049 - RNA, 24 nt, Artificial Sequence
  Synthetic oligonucleotide
  hsa-miR-939-5p MIMAT0004982
uggggagcugaggcucugggggug

SEQ ID NO: 2050 - RNA, 22 nt, Artificial Sequence
  Synthetic oligonucleotide
  hsa-miR-485-5p MIMAT0002175
agaggcuggccgugaugaauuc

SEQ ID NO: 2051 - RNA, 17 nt, Artificial Sequence
  Synthetic oligonucleotide
  hsa-miR-4251 MIMAT0016883
ccugagaaaagggccaa

SEQ ID NO: 2052 - RNA, 21 nt, Artificial Sequence
  Synthetic oligonucleotide
  hsa-miR-7158-3p MIMAT0028227
cugaacuagagauugggccca

SEQ ID NO: 2053 - RNA, 20 nt, Artificial Sequence
  Synthetic oligonucleotide
  hsa-miR-4506 MIMAT0019042
aaauggguggucugaggcaa

SEQ ID NO: 2054 - RNA, 21 nt, Artificial Sequence
  Synthetic oligonucleotide
  hsa-miR-6880-3p MIMAT0027661
ccgccuucucuccucccccag

SEQ ID NO: 2055 - RNA, 22 nt, Artificial Sequence
  Synthetic oligonucleotide
  hsa-miR-144-5p MIMAT0004600
ggauaucaucauauacuguaag

SEQ ID NO: 2056 - RNA, 22 nt, Artificial Sequence
  Synthetic oligonucleotide
  hsa-miR-122-5p MIMAT0000421
uggagugugacaaugguguuug

SEQ ID NO: 2057 - RNA, 22 nt, Artificial Sequence
  Synthetic oligonucleotide
  hsa-miR-206 MIMAT0000462
uggaauguaaggaagugugugg

SEQ ID NO: 2058 - RNA, 22 nt, Artificial Sequence
  Synthetic oligonucleotide
  hsa-miR-548f-5p MIMAT0026739
ugcaaaaguaaucacaguuuuu

SEQ ID NO: 2059 - RNA, 23 nt, Artificial Sequence
  Synthetic oligonucleotide
  hsa-miR-136-5p MIMAT0000448
acuccauuuguuuugaugaugga

SEQ ID NO: 2060 - RNA, 22 nt, Artificial Sequence
  Synthetic oligonucleotide
  hsa-miR-4715-5p MIMAT0019824
aaguuggcugcaguuaaggugg

SEQ ID NO: 2061 - RNA, 23 nt, Artificial Sequence
  Synthetic oligonucleotide
  hsa-miR-6810-3p MIMAT0027521
uccccugcucccuuguuccccag

SEQ ID NO: 2062 - RNA, 20 nt, Artificial Sequence
  Synthetic oligonucleotide
  hsa-miR-8072 MIMAT0030999
ggcggcggggagguaggcag

SEQ ID NO: 2063 - RNA, 18 nt, Artificial Sequence
  Synthetic oligonucleotide
  hsa-miR-4295 MIMAT0016844
cagugcaauguuuuccuu

SEQ ID NO: 2064 - RNA, 21 nt, Artificial Sequence
  Synthetic oligonucleotide
  hsa-miR-5195-3p MIMAT0021127
auccaguucucugagggggcu

SEQ ID NO: 2065 - RNA, 22 nt, Artificial Sequence
  Synthetic oligonucleotide
  hsa-miR-3689f MIMAT0019010
ugugauaucgugcuuccuggga

SEQ ID NO: 2066 - RNA, 22 nt, Artificial Sequence
  Synthetic oligonucleotide
  hsa-miR-1972 MIMAT0009447
ucaggccaggcacaguggcuca

SEQ ID NO: 2067 - RNA, 22 nt, Artificial Sequence
  Synthetic oligonucleotide
  hsa-miR-340-5p MIMAT0004692
uuauaaagcaaugagacugauu

SEQ ID NO: 2068 - RNA, 21 nt, Artificial Sequence
  Synthetic oligonucleotide
  hsa-miR-3120-5p MIMAT0019198
ccugucugugccugcuguaca

SEQ ID NO: 2069 - RNA, 22 nt, Artificial Sequence
  Synthetic oligonucleotide
  hsa-miR-485-3p MIMAT0002176
gucauacacggcucuccucucu

SEQ ID NO: 2070 - RNA, 19 nt, Artificial Sequence
  Synthetic oligonucleotide
  hsa-miR-632 MIMAT0003302
gugucugcuuccuguggga

SEQ ID NO: 2071 - RNA, 22 nt, Artificial Sequence
  Synthetic oligonucleotide
  hsa-miR-25-3p MIMAT0000081
cauugcacuugucucggucuga

SEQ ID NO: 2072 - RNA, 22 nt, Artificial Sequence
  Synthetic oligonucleotide
  hsa-miR-4684-3p MIMAT0019770
uguugcaagucgguggagacgu

SEQ ID NO: 2073 - RNA, 23 nt, Artificial Sequence
  Synthetic oligonucleotide
  hsa-miR-6728-5p MIMAT0027357
uugggaugguaggaccagagggg

SEQ ID NO: 2074 - RNA, 19 nt, Artificial Sequence
  Synthetic oligonucleotide
  hsa-miR-4289 MIMAT0016920
gcauugugcagggcuauca

SEQ ID NO: 2075 - RNA, 22 nt, Artificial Sequence
  Synthetic oligonucleotide
  hsa-miR-3688-3p MIMAT0018116
uauggaaagacuuugccacucu

SEQ ID NO: 2076 - RNA, 23 nt, Artificial Sequence
  Synthetic oligonucleotide
  hsa-miR-6851-5p MIMAT0027602
aggaggugguacuaggggccagc

SEQ ID NO: 2077 - RNA, 21 nt, Artificial Sequence
  Synthetic oligonucleotide
  hsa-miR-455-3p MIMAT0004784
gcaguccaugggcauauacac

SEQ ID NO: 2078 - RNA, 23 nt, Artificial Sequence
  Synthetic oligonucleotide
  hsa-miR-425-5p MIMAT0003393
aaugacacgaucacucccguuga

SEQ ID NO: 2079 - RNA, 22 nt, Artificial Sequence
  Synthetic oligonucleotide
  hsa-miR-181c-5p MIMAT0000258
aacauucaaccugucggugagu

SEQ ID NO: 2080 - RNA, 22 nt, Artificial Sequence
  Synthetic oligonucleotide
  hsa-miR-6717-5p MIMAT0025846
aggcgauguggggauguagaga

SEQ ID NO: 2081 - RNA, 22 nt, Artificial Sequence
  Synthetic oligonucleotide
  hsa-miR-5685 MIMAT0022475
acagcccagcaguuaucacggg

SEQ ID NO: 2082 - RNA, 21 nt, Artificial Sequence
  Synthetic oligonucleotide
  hsa-miR-3668 MIMAT0018091
aauguagagauugaucaaaau

SEQ ID NO: 2083 - RNA, 22 nt, Artificial Sequence
  Synthetic oligonucleotide
  hsa-miR-338-3p MIMAT0000763
uccagcaucagugauuuuguug

SEQ ID NO: 2084 - RNA, 21 nt, Artificial Sequence
  Synthetic oligonucleotide
  hsa-miR-499b-5p MIMAT0019897
acagacuugcugugauguuca

SEQ ID NO: 2085 - RNA, 22 nt, Artificial Sequence
  Synthetic oligonucleotide
  hsa-miR-211-5p MIMAT0000268
uucccuuugucauccuucgccu

SEQ ID NO: 2086 - RNA, 22 nt, Artificial Sequence
  Synthetic oligonucleotide
  hsa-miR-153-5p MIMAT0026480
ucauuuuugugauguugcagcu

SEQ ID NO: 2087 - RNA, 22 nt, Artificial Sequence
  Synthetic oligonucleotide
  hsa-miR-4703-3p MIMAT0019802
uguaguuguauuguauugccac

SEQ ID NO: 2088 - RNA, 23 nt, Artificial Sequence
  Synthetic oligonucleotide
  hsa-miR-767-5p MIMAT0003882
ugcaccaugguugucugagcaug

SEQ ID NO: 2089 - RNA, 21 nt, Artificial Sequence
  Synthetic oligonucleotide
  hsa-miR-219a-5p MIMAT0000276
ugauuguccaaacgcaauucu

SEQ ID NO: 2090 - RNA, 22 nt, Artificial Sequence
  Synthetic oligonucleotide
  hsa-miR-219a-1-3p MIMAT0004567
agaguugagucuggacgucccg

SEQ ID NO: 2091 - RNA, 22 nt, Artificial Sequence
  Synthetic oligonucleotide
  hsa-miR-4436b-5p MIMAT0019940
guccacuucugccugcccugcc

SEQ ID NO: 2092 - RNA, 22 nt, Artificial Sequence
  Synthetic oligonucleotide
  hsa-miR-3121-5p MIMAT0019199
uccuuugccuauucuauuuaag

SEQ ID NO: 2093 - RNA, 21 nt, Artificial Sequence
  Synthetic oligonucleotide
  hsa-miR-5572 MIMAT0022260
guuggggugcaggggucugcu

SEQ ID NO: 2094 - RNA, 21 nt, Artificial Sequence
  Synthetic oligonucleotide
  hsa-miR-4523 MIMAT0019061
gaccgagagggccucggcugu

SEQ ID NO: 2095 - RNA, 21 nt, Artificial Sequence
  Synthetic oligonucleotide
  hsa-miR-140-3p MIMAT0004597
uaccacaggguagaaccacgg

SEQ ID NO: 2096 - RNA, 21 nt, Artificial Sequence
  Synthetic oligonucleotide
  hsa-miR-3659 MIMAT0018080
ugaguguugucuacgagggca

SEQ ID NO: 2097 - RNA, 22 nt, Artificial Sequence
  Synthetic oligonucleotide
  hsa-miR-3679-3p MIMAT0018105
cuuccccccaguaaucuucauc

SEQ ID NO: 2098 - RNA, 22 nt, Artificial Sequence
  Synthetic oligonucleotide
  hsa-miR-4526 MIMAT0019065
gcugacagcagggcuggccgcu

SEQ ID NO: 2099 - RNA, 21 nt, Artificial Sequence
  Synthetic oligonucleotide
  hsa-miR-7850-5p MIMAT0030425
guuuggacauaguguggcugg

SEQ ID NO: 2100 - RNA, 19 nt, Artificial Sequence
  Synthetic oligonucleotide
  hsa-miR-6134 MIMAT0024618
ugaggugguaggauguaga

SEQ ID NO: 2101 - RNA, 21 nt, Artificial Sequence
  Synthetic oligonucleotide
  hsa-miR-625-5p MIMAT0003294
agggggaaaguucuauagucc

SEQ ID NO: 2102 - RNA, 21 nt, Artificial Sequence
  Synthetic oligonucleotide
  hsa-miR-369-3p MIMAT0000721
aauaauacaugguugaucuuu

SEQ ID NO: 2103 - RNA, 22 nt, Artificial Sequence
  Synthetic oligonucleotide
  hsa-miR-1287-3p MIMAT0026738
cucuagccacagaugcagugau

SEQ ID NO: 2104 - RNA, 22 nt, Artificial Sequence
  Synthetic oligonucleotide
  hsa-miR-132-3p MIMAT0000426
uaacagucuacagccauggucg

SEQ ID NO: 2105 - RNA, 22 nt, Artificial Sequence
  Synthetic oligonucleotide
  hsa-miR-6882-5p MIMAT0027664
uacaagucaggagcugaagcag

SEQ ID NO: 2106 - RNA, 22 nt, Artificial Sequence
  Synthetic oligonucleotide
  hsa-miR-1537-5p MIMAT0026765
agcuguaauuagucaguuuucu

SEQ ID NO: 2107 - RNA, 21 nt, Artificial Sequence
  Synthetic oligonucleotide
  hsa-miR-5002-3p MIMAT0021024
ugacugccucacugaccacuu

SEQ ID NO: 2108 - RNA, 23 nt, Artificial Sequence
  Synthetic oligonucleotide
  hsa-miR-639 MIMAT0003309
aucgcugcgguugcgagcgcugu

SEQ ID NO: 2109 - RNA, 23 nt, Artificial Sequence
  Synthetic oligonucleotide
  hsa-miR-6756-5p MIMAT0027412
aggguggggcuggagguggggcu

SEQ ID NO: 2110 - RNA, 21 nt, Artificial Sequence
  Synthetic oligonucleotide
  hsa-miR-1908-3p MIMAT0026916
ccggccgccggcuccgccccg

SEQ ID NO: 2111 - RNA, 21 nt, Artificial Sequence
  Synthetic oligonucleotide
  hsa-miR-6811-3p MIMAT0027523
agccugugcuugucccugcag

SEQ ID NO: 2112 - RNA, 21 nt, Artificial Sequence
  Synthetic oligonucleotide
  hsa-miR-6514-3p MIMAT0025485
cugccuguucuuccacuccag

SEQ ID NO: 2113 - RNA, 24 nt, Artificial Sequence
  Synthetic oligonucleotide
  hsa-miR-6738-3p MIMAT0027378
cuucugccugcauucuacucccag

SEQ ID NO: 2114 - RNA, 22 nt, Artificial Sequence
  Synthetic oligonucleotide
  hsa-miR-548h-5p MIMAT0005928
aaaaguaaucgcgguuuuuguc

SEQ ID NO: 2115 - RNA, 21 nt, Artificial Sequence
  Synthetic oligonucleotide
  hsa-miR-595 MIMAT0003263
gaagugugccguggugugucu

SEQ ID NO: 2116 - RNA, 21 nt, Artificial Sequence
  Synthetic oligonucleotide
  hsa-miR-662 MIMAT0003325
ucccacguuguggcccagcag

SEQ ID NO: 2117 - RNA, 22 nt, Artificial Sequence
  Synthetic oligonucleotide
  hsa-miR-130a-3p MIMAT0000425
cagugcaauguuaaaagggcau

SEQ ID NO: 2118 - RNA, 19 nt, Artificial Sequence
  Synthetic oligonucleotide
  hsa-miR-4736 MIMAT0019862
aggcagguuaucugggcug

SEQ ID NO: 2119 - RNA, 21 nt, Artificial Sequence
  Synthetic oligonucleotide
  hsa-miR-5088-3p MIMAT0027041
ucccuucuuccugggcccuca

SEQ ID NO: 2120 - RNA, 22 nt, Artificial Sequence
  Synthetic oligonucleotide
  hsa-miR-5004-5p MIMAT0021027
ugaggacagggcaaauucacga

SEQ ID NO: 2121 - RNA, 23 nt, Artificial Sequence
  Synthetic oligonucleotide
  hsa-miR-142-3p MIMAT0000434
uguaguguuuccuacuuuaugga

SEQ ID NO: 2122 - RNA, 21 nt, Artificial Sequence
  Synthetic oligonucleotide
  hsa-miR-4474-5p MIMAT0019234
uuagucucaugaucagacaca

SEQ ID NO: 2123 - RNA, 20 nt, Artificial Sequence
  Synthetic oligonucleotide
  hsa-miR-520d-5p MIMAT0002855
cuacaaagggaagcccuuuc

SEQ ID NO: 2124 - RNA, 20 nt, Artificial Sequence
  Synthetic oligonucleotide
  hsa-miR-1205 MIMAT0005869
ucugcaggguuugcuuugag

SEQ ID NO: 2125 - RNA, 22 nt, Artificial Sequence
  Synthetic oligonucleotide
  hsa-miR-1537-3p MIMAT0007399
aaaaccgucuaguuacaguugu

SEQ ID NO: 2126 - RNA, 22 nt, Artificial Sequence
  Synthetic oligonucleotide
  hsa-miR-5187-5p MIMAT0021117
ugggaugagggauugaagugga

SEQ ID NO: 2127 - RNA, 22 nt, Artificial Sequence
  Synthetic oligonucleotide
  hsa-miR-4428 MIMAT0018943
caaggagacgggaacauggagc

SEQ ID NO: 2128 - RNA, 21 nt, Artificial Sequence
  Synthetic oligonucleotide
  hsa-miR-4646-3p MIMAT0019708
auugucccucucccuucccag

SEQ ID NO: 2129 - RNA, 22 nt, Artificial Sequence
  Synthetic oligonucleotide
  hsa-miR-3529-5p MIMAT0019828
agguagacugggauuuguuguu

SEQ ID NO: 2130 - RNA, 21 nt, Artificial Sequence
  Synthetic oligonucleotide
  hsa-miR-6809-3p MIMAT0027519
cuucucuucucuccuucccag

SEQ ID NO: 2131 - RNA, 22 nt, Artificial Sequence
  Synthetic oligonucleotide
  hsa-miR-1-5p MIMAT0031892
acauacuucuuuauaugcccau

SEQ ID NO: 2132 - RNA, 21 nt, Artificial Sequence
  Synthetic oligonucleotide
  hsa-miR-27a-3p MIMAT0000084
uucacaguggcuaaguuccgc

SEQ ID NO: 2133 - RNA, 23 nt, Artificial Sequence
  Synthetic oligonucleotide
  hsa-miR-671-5p MIMAT0003880
aggaagcccuggaggggcuggag

SEQ ID NO: 2134 - RNA, 21 nt, Artificial Sequence
  Synthetic oligonucleotide
  hsa-miR-1285-5p MIMAT0022719
gaucucacuuuguugcccagg

SEQ ID NO: 2135 - RNA, 22 nt, Artificial Sequence
  Synthetic oligonucleotide
  hsa-miR-5007-5p MIMAT0021035
uagagucuggcugauaugguuu

SEQ ID NO: 2136 - RNA, 21 nt, Artificial Sequence
  Synthetic oligonucleotide
  hsa-miR-3919 MIMAT0018193
gcagagaacaaaggacucagu

SEQ ID NO: 2137 - RNA, 22 nt, Artificial Sequence
  Synthetic oligonucleotide
  hsa-miR-8059 MIMAT0030986
ggggaacuguagaugaaaaggc

SEQ ID NO: 2138 - RNA, 22 nt, Artificial Sequence
  Synthetic oligonucleotide
  hsa-miR-539-5p MIMAT0003163
ggagaaauuauccuuggugugu

SEQ ID NO: 2139 - RNA, 22 nt, Artificial Sequence
  Synthetic oligonucleotide
  hsa-miR-3124-3p MIMAT0019200
acuuuccucacucccgugaagu

SEQ ID NO: 2140 - RNA, 20 nt, Artificial Sequence
  Synthetic oligonucleotide
  hsa-miR-33b-5p MIMAT0003301
gugcauugcuguugcauugc

SEQ ID NO: 2141 - RNA, 20 nt, Artificial Sequence
  Synthetic oligonucleotide
  hsa-miR-7108-3p MIMAT0028114
acccgcccgucuccccacag

SEQ ID NO: 2142 - RNA, 26 nt, Artificial Sequence
  Synthetic oligonucleotide
  hsa-miR-3916 MIMAT0018190
aagaggaagaaauggcugguucucag

SEQ ID NO: 2143 - RNA, 17 nt, Artificial Sequence
  Synthetic oligonucleotide
  hsa-miR-4275 MIMAT0016905
ccaauuaccacuucuuu

SEQ ID NO: 2144 - RNA, 23 nt, Artificial Sequence
  Synthetic oligonucleotide
  hsa-miR-6744-3p MIMAT0027390
gggccucucuugucauccugcag

SEQ ID NO: 2145 - RNA, 20 nt, Artificial Sequence
  Synthetic oligonucleotide
  hsa-miR-6756-3p MIMAT0027413
uccccuuccucccugcccag

SEQ ID NO: 2146 - RNA, 22 nt, Artificial Sequence
  Synthetic oligonucleotide
  hsa-miR-3170 MIMAT0015045
cugggguucugagacagacagu

SEQ ID NO: 2147 - RNA, 19 nt, Artificial Sequence
  Synthetic oligonucleotide
  hsa-miR-3649 MIMAT0018069
agggaccugagugucuaag

SEQ ID NO: 2148 - RNA, 23 nt, Artificial Sequence
  Synthetic oligonucleotide
  hsa-miR-4754 MIMAT0019894
augcggaccuggguuagcggagu

SEQ ID NO: 2149 - RNA, 22 nt, Artificial Sequence
  Synthetic oligonucleotide
  hsa-miR-5586-3p MIMAT0022288
cagagugacaagcugguuaaag

SEQ ID NO: 2150 - RNA, 20 nt, Artificial Sequence
  Synthetic oligonucleotide
  hsa-miR-490-5p MIMAT0004764
ccauggaucuccaggugggu

SEQ ID NO: 2151 - RNA, 23 nt, Artificial Sequence
  Synthetic oligonucleotide
  hsa-miR-34c-5p MIMAT0000686
aggcaguguaguuagcugauugc

SEQ ID NO: 2152 - RNA, 22 nt, Artificial Sequence
  Synthetic oligonucleotide
  hsa-miR-522-3p MIMAT0002868
aaaaugguucccuuuagagugu

SEQ ID NO: 2153 - RNA, 22 nt, Artificial Sequence
  Synthetic oligonucleotide
  hsa-miR-3689b-5p MIMAT0018180
ugugauaucaugguuccuggga

SEQ ID NO: 2154 - RNA, 17 nt, Artificial Sequence
  Synthetic oligonucleotide
  hsa-miR-4306 MIMAT0016858
uggagagaaaggcagua

SEQ ID NO: 2155 - RNA, 22 nt, Artificial Sequence
  Synthetic oligonucleotide
  hsa-miR-4515 MIMAT0019052
aggacuggacucccggcagccc

SEQ ID NO: 2156 - RNA, 24 nt, Artificial Sequence
  Synthetic oligonucleotide
  hsa-miR-1254 MIMAT0005905
agccuggaagcuggagccugcagu

SEQ ID NO: 2157 - RNA, 23 nt, Artificial Sequence
  Synthetic oligonucleotide
  hsa-miR-373-3p MIMAT0000726
gaagugcuucgauuuuggggugu

SEQ ID NO: 2158 - RNA, 22 nt, Artificial Sequence
  Synthetic oligonucleotide
  hsa-miR-365b-5p MIMAT0022833
agggacuuucaggggcagcugu

SEQ ID NO: 2159 - RNA, 23 nt, Artificial Sequence
  Synthetic oligonucleotide
  hsa-miR-4802-3p MIMAT0019982
uacauggauggaaaccuucaagc

SEQ ID NO: 2160 - RNA, 21 nt, Artificial Sequence
  Synthetic oligonucleotide
  hsa-miR-548aj-3p MIMAT0018990
uaaaaacugcaauuacuuuua

SEQ ID NO: 2161 - RNA, 24 nt, Artificial Sequence
  Synthetic oligonucleotide
  hsa-miR-6876-3p MIMAT0027653
agcugucuguguuuuccuucucag

SEQ ID NO: 2162 - RNA, 22 nt, Artificial Sequence
  Synthetic oligonucleotide
  hsa-miR-185-5p MIMAT0000455
uggagagaaaggcaguuccuga

SEQ ID NO: 2163 - RNA, 23 nt, Artificial Sequence
  Synthetic oligonucleotide
  hsa-miR-3127-5p MIMAT0014990
aucagggcuuguggaaugggaag

SEQ ID NO: 2164 - RNA, 21 nt, Artificial Sequence
  Synthetic oligonucleotide
  hsa-miR-6503-3p MIMAT0025463
gggacuaggaugcagaccucc

SEQ ID NO: 2165 - RNA, 25 nt, Artificial Sequence
  Synthetic oligonucleotide
  hsa-miR-3180-5p MIMAT0015057
cuuccagacgcuccgccccacgucg

SEQ ID NO: 2166 - RNA, 22 nt, Artificial Sequence
  Synthetic oligonucleotide
  hsa-miR-5698 MIMAT0022491
ugggggagugcagugauugugg

SEQ ID NO: 2167 - RNA, 22 nt, Artificial Sequence
  Synthetic oligonucleotide
  hsa-miR-4477b MIMAT0019005
auuaaggacauuugugauugau

SEQ ID NO: 2168 - RNA, 21 nt, Artificial Sequence
  Synthetic oligonucleotide
  hsa-miR-888-5p MIMAT0004916
uacucaaaaagcugucaguca

SEQ ID NO: 2169 - RNA, 20 nt, Artificial Sequence
  Synthetic oligonucleotide
  hsa-miR-548ah-5p MIMAT0018972
aaaagugauugcaguguuug

SEQ ID NO: 2170 - RNA, 22 nt, Artificial Sequence
  Synthetic oligonucleotide
  hsa-miR-7-2-3p MIMAT0004554
caacaaaucccagucuaccuaa

SEQ ID NO: 2171 - RNA, 22 nt, Artificial Sequence
  Synthetic oligonucleotide
  hsa-miR-4520-2-3p MIMAT0020300
uuuggacagaaaacacgcaggu

SEQ ID NO: 2172 - RNA, 21 nt, Artificial Sequence
  Synthetic oligonucleotide
  hsa-miR-6077 MIMAT0023702
gggaagagcuguacggccuuc

SEQ ID NO: 2173 - RNA, 17 nt, Artificial Sequence
  Synthetic oligonucleotide
  hsa-miR-3123 MIMAT0014985
cagagaauuguuuaauc

SEQ ID NO: 2174 - RNA, 23 nt, Artificial Sequence
  Synthetic oligonucleotide
  hsa-miR-4693-5p MIMAT0019784
auacugugaauuucacugucaca

SEQ ID NO: 2175 - RNA, 23 nt, Artificial Sequence
  Synthetic oligonucleotide
  hsa-miR-6807-3p MIMAT0027515
cacugcauuccugcuuggcccag

SEQ ID NO: 2176 - RNA, 17 nt, Artificial Sequence
  Synthetic oligonucleotide
  hsa-miR-4283 MIMAT0016914
uggggcucagcgaguuu

SEQ ID NO: 2177 - RNA, 23 nt, Artificial Sequence
  Synthetic oligonucleotide
  hsa-miR-922 MIMAT0004972
gcagcagagaauaggacuacguc

SEQ ID NO: 2178 - RNA, 21 nt, Artificial Sequence
  Synthetic oligonucleotide
  hsa-miR-6890-5p MIMAT0027680
caugggguagggcagaguagg

SEQ ID NO: 2179 - RNA, 18 nt, Artificial Sequence
  Synthetic oligonucleotide
  hsa-miR-4284 MIMAT0016915
gggcucacaucaccccau

SEQ ID NO: 2180 - RNA, 21 nt, Artificial Sequence
  Synthetic oligonucleotide
  hsa-miR-4789-3p MIMAT0019960
cacacauagcagguguauaua

SEQ ID NO: 2181 - RNA, 22 nt, Artificial Sequence
  Synthetic oligonucleotide
  hsa-miR-7702 MIMAT0030017
cuuagacugccagacucccuga

SEQ ID NO: 2182 - RNA, 18 nt, Artificial Sequence
  Synthetic oligonucleotide
  hsa-miR-513a-5p MIMAT0002877
uucacagggaggugucau

SEQ ID NO: 2183 - RNA, 22 nt, Artificial Sequence
  Synthetic oligonucleotide
  hsa-miR-6787-5p MIMAT0027474
uggcggggguagagcuggcugc

SEQ ID NO: 2184 - RNA, 22 nt, Artificial Sequence
  Synthetic oligonucleotide
  hsa-miR-3667-5p MIMAT0018089
aaagacccauugaggagaaggu

SEQ ID NO: 2185 - RNA, 22 nt, Artificial Sequence
  Synthetic oligonucleotide
  hsa-miR-450a-5p MIMAT0001545
uuuugcgauguguuccuaauau

SEQ ID NO: 2186 - RNA, 23 nt, Artificial Sequence
  Synthetic oligonucleotide
  hsa-miR-3118 MIMAT0014980
ugugacugcauuaugaaaauucu

SEQ ID NO: 2187 - RNA, 21 nt, Artificial Sequence
  Synthetic oligonucleotide
  hsa-miR-6076 MIMAT0023701
agcaugacagaggagaggugg

SEQ ID NO: 2188 - RNA, 19 nt, Artificial Sequence
  Synthetic oligonucleotide
  hsa-miR-1290 MIMAT0005880
uggauuuuuggaucaggga

SEQ ID NO: 2189 - RNA, 22 nt, Artificial Sequence
  Synthetic oligonucleotide
  hsa-miR-3163 MIMAT0015037
uauaaaaugagggcaguaagac

SEQ ID NO: 2190 - RNA, 23 nt, Artificial Sequence
  Synthetic oligonucleotide
  hsa-miR-7154-5p MIMAT0028218
uucaugaacugggucuagcuugg

SEQ ID NO: 2191 - DNA, 22 bp, Artificial Sequence
  Synthetic oligonucleotide
  hsa-miR-663a MIMAT0003326
aggcggggcgccgcgggaccgc

SEQ ID NO: 2192 - RNA, 22 nt, Artificial Sequence
  Synthetic oligonucleotide
  hsa-miR-6824-5p MIMAT0027548
guaggggagguugggccaggga

SEQ ID NO: 2193 - RNA, 23 nt, Artificial Sequence
  Synthetic oligonucleotide
  hsa-miR-9-5p MIMAT0000441
ucuuugguuaucuagcuguauga

SEQ ID NO: 2194 - RNA, 19 nt, Artificial Sequence
  Synthetic oligonucleotide
  hsa-miR-548f-3p MIMAT0005895
aaaaacuguaauuacuuuu

SEQ ID NO: 2195 - RNA, 25 nt, Artificial Sequence
  Synthetic oligonucleotide
  hsa-miR-378c MIMAT0016847
acuggacuuggagucagaagagugg

SEQ ID NO: 2196 - RNA, 22 nt, Artificial Sequence
  Synthetic oligonucleotide
  hsa-miR-216a-3p MIMAT0022844
ucacaguggucucugggauuau

SEQ ID NO: 2197 - RNA, 24 nt, Artificial Sequence
  Synthetic oligonucleotide
  hsa-miR-6831-5p MIMAT0027562
uagguagagugugaggaggagguc

SEQ ID NO: 2198 - RNA, 22 nt, Artificial Sequence
  Synthetic oligonucleotide
  hsa-miR-892c-3p MIMAT0025858
cacuguuuccuuucugagugga

SEQ ID NO: 2199 - RNA, 24 nt, Artificial Sequence
  Synthetic oligonucleotide
  hsa-miR-125a-5p MIMAT0000443
ucccugagacccuuuaaccuguga

SEQ ID NO: 2200 - RNA, 19 nt, Artificial Sequence
  Synthetic oligonucleotide
  hsa-miR-378e MIMAT0018927
acuggacuuggagucagga

SEQ ID NO: 2201 - RNA, 22 nt, Artificial Sequence
  Synthetic oligonucleotide
  hsa-miR-3617-5p MIMAT0017997
aaagacauaguugcaagauggg

SEQ ID NO: 2202 - RNA, 24 nt, Artificial Sequence
  Synthetic oligonucleotide
  hsa-miR-3662 MIMAT0018083
gaaaaugaugaguagugacugaug

SEQ ID NO: 2203 - RNA, 19 nt, Artificial Sequence
  Synthetic oligonucleotide
  hsa-miR-604 MIMAT0003272
aggcugcggaauucaggac

SEQ ID NO: 2204 - RNA, 18 nt, Artificial Sequence
  Synthetic oligonucleotide
  hsa-miR-4278 MIMAT0016910
cuaggggguuugcccuug

SEQ ID NO: 2205 - RNA, 22 nt, Artificial Sequence
  Synthetic oligonucleotide
  hsa-miR-3140-3p MIMAT0015008
agcuuuugggaauucagguagu

SEQ ID NO: 2206 - RNA, 20 nt, Artificial Sequence
  Synthetic oligonucleotide
  hsa-miR-181b-2-3p MIMAT0031893
cucacugaucaaugaaugca

SEQ ID NO: 2207 - RNA, 21 nt, Artificial Sequence
  Synthetic oligonucleotide
  hsa-miR-4540 MIMAT0019083
uuaguccugccuguagguuua

SEQ ID NO: 2208 - RNA, 19 nt, Artificial Sequence
  Synthetic oligonucleotide
  hsa-miR-6130 MIMAT0024614
ugagggaguggauuguaug

SEQ ID NO: 2209 - RNA, 22 nt, Artificial Sequence
  Synthetic oligonucleotide
  hsa-miR-3907 MIMAT0018179
aggugcuccaggcuggcucaca

SEQ ID NO: 2210 - RNA, 22 nt, Artificial Sequence
  Synthetic oligonucleotide
  hsa-miR-493-3p MIMAT0003161
ugaaggucuacugugugccagg

SEQ ID NO: 2211 - RNA, 17 nt, Artificial Sequence
  Synthetic oligonucleotide
  hsa-miR-4456 MIMAT0018978
ccugguggcuuccuuuu

SEQ ID NO: 2212 - RNA, 22 nt, Artificial Sequence
  Synthetic oligonucleotide
  hsa-miR-5009-3p MIMAT0021042
uccuaaaucugaaaguccaaaa

SEQ ID NO: 2213 - RNA, 22 nt, Artificial Sequence
  Synthetic oligonucleotide
  hsa-miR-99a-5p MIMAT0000097
aacccguagauccgaucuugug

SEQ ID NO: 2214 - RNA, 22 nt, Artificial Sequence
  Synthetic oligonucleotide
  hsa-miR-196a-5p MIMAT0000226
uagguaguuucauguuguuggg

SEQ ID NO: 2215 - RNA, 23 nt, Artificial Sequence
  Synthetic oligonucleotide
  hsa-miR-4743-5p MIMAT0019874
uggccggaugggacaggaggcau

SEQ ID NO: 2216 - RNA, 22 nt, Artificial Sequence
  Synthetic oligonucleotide
  hsa-miR-4723-3p MIMAT0019839
cccucucuggcuccuccccaaa

SEQ ID NO: 2217 - RNA, 19 nt, Artificial Sequence
  Synthetic oligonucleotide
  hsa-miR-6763-5p MIMAT0027426
cuggggaguggcuggggag

SEQ ID NO: 2218 - RNA, 22 nt, Artificial Sequence
  Synthetic oligonucleotide
  hsa-miR-6809-5p MIMAT0027518
uggcaaggaaagaagaggauca

SEQ ID NO: 2219 - RNA, 21 nt, Artificial Sequence
  Synthetic oligonucleotide
  hsa-miR-890 MIMAT0004912
uacuuggaaaggcaucaguug

SEQ ID NO: 2220 - RNA, 21 nt, Artificial Sequence
  Synthetic oligonucleotide
  hsa-miR-4667-3p MIMAT0019744
ucccuccuucuguccccacag

SEQ ID NO: 2221 - RNA, 22 nt, Artificial Sequence
  Synthetic oligonucleotide
  hsa-miR-1247-5p MIMAT0005899
acccgucccguucguccccgga

SEQ ID NO: 2222 - RNA, 22 nt, Artificial Sequence
  Synthetic oligonucleotide
  hsa-miR-6512-5p MIMAT0025480
uaccauuagaagagcuggaaga

SEQ ID NO: 2223 - RNA, 24 nt, Artificial Sequence
  Synthetic oligonucleotide
  hsa-miR-3613-3p MIMAT0017991
acaaaaaaaaaagcccaacccuuc

SEQ ID NO: 2224 - RNA, 22 nt, Artificial Sequence
  Synthetic oligonucleotide
  hsa-miR-548a-5p MIMAT0004803
aaaaguaauugcgaguuuuacc

SEQ ID NO: 2225 - RNA, 21 nt, Artificial Sequence
  Synthetic oligonucleotide
  hsa-miR-1180-5p MIMAT0026735
ggacccacccggccgggaaua

SEQ ID NO: 2226 - RNA, 22 nt, Artificial Sequence
  Synthetic oligonucleotide
  hsa-miR-526b-3p MIMAT0002836
gaaagugcuuccuuuuagaggc

SEQ ID NO: 2227 - RNA, 22 nt, Artificial Sequence
  Synthetic oligonucleotide
  hsa-miR-4669 MIMAT0019749
uguguccgggaaguggaggagg

SEQ ID NO: 2228 - RNA, 21 nt, Artificial Sequence
  Synthetic oligonucleotide
  hsa-miR-497-5p MIMAT0002820
cagcagcacacugugguuugu

SEQ ID NO: 2229 - RNA, 17 nt, Artificial Sequence
  Synthetic oligonucleotide
  hsa-miR-4426 MIMAT0018941
gaagauggacguacuuu

SEQ ID NO: 2230 - RNA, 24 nt, Artificial Sequence
  Synthetic oligonucleotide
  hsa-miR-3976 MIMAT0019361
uauagagagcaggaagauuaaugu

SEQ ID NO: 2231 - RNA, 18 nt, Artificial Sequence
  Synthetic oligonucleotide
  hsa-miR-3196 MIMAT0015080
cggggcggcaggggccuc

SEQ ID NO: 2232 - RNA, 22 nt, Artificial Sequence
  Synthetic oligonucleotide
  hsa-miR-1273g-5p MIMAT0020602
ggugguugaggcugcaguaagu

SEQ ID NO: 2233 - RNA, 24 nt, Artificial Sequence
  Synthetic oligonucleotide
  hsa-miR-6840-5p MIMAT0027582
acccccgggcaaagaccugcagau

SEQ ID NO: 2234 - RNA, 23 nt, Artificial Sequence
  Synthetic oligonucleotide
  hsa-miR-6889-5p MIMAT0027678
ucggggagucugggguccggaau

SEQ ID NO: 2235 - RNA, 22 nt, Artificial Sequence
  Synthetic oligonucleotide
  hsa-miR-642b-3p MIMAT0018444
agacacauuuggagagggaccc

SEQ ID NO: 2236 - RNA, 22 nt, Artificial Sequence
  Synthetic oligonucleotide
  hsa-miR-363-3p MIMAT0000707
aauugcacgguauccaucugua

SEQ ID NO: 2237 - RNA, 22 nt, Artificial Sequence
  Synthetic oligonucleotide
  hsa-miR-3620-3p MIMAT0018001
ucacccugcaucccgcacccag

SEQ ID NO: 2238 - RNA, 19 nt, Artificial Sequence
  Synthetic oligonucleotide
  hsa-miR-4265 MIMAT0016891
cugugggcucagcucuggg

SEQ ID NO: 2239 - RNA, 22 nt, Artificial Sequence
  Synthetic oligonucleotide
  hsa-miR-6869-5p MIMAT0027638
gugaguaguggcgcgcggcggc

SEQ ID NO: 2240 - RNA, 22 nt, Artificial Sequence
  Synthetic oligonucleotide
  hsa-miR-3154 MIMAT0015028
cagaaggggaguugggagcaga

SEQ ID NO: 2241 - RNA, 26 nt, Artificial Sequence
  Synthetic oligonucleotide
  hsa-miR-4685-5p MIMAT0019771
cccagggcuuggaguggggcaagguu

SEQ ID NO: 2242 - RNA, 22 nt, Artificial Sequence
  Synthetic oligonucleotide
  hsa-miR-6853-3p MIMAT0027607
uguucauuggaacccugcgcag

SEQ ID NO: 2243 - RNA, 22 nt, Artificial Sequence
  Synthetic oligonucleotide
  hsa-miR-4520-3p MIMAT0019057
uuggacagaaaacacgcaggaa

SEQ ID NO: 2244 - RNA, 24 nt, Artificial Sequence
  Synthetic oligonucleotide
  hsa-miR-3978 MIMAT0019363
guggaaagcaugcauccagggugu

SEQ ID NO: 2245 - RNA, 22 nt, Artificial Sequence
  Synthetic oligonucleotide
  hsa-miR-493-5p MIMAT0002813
uuguacaugguaggcuuucauu

SEQ ID NO: 2246 - RNA, 24 nt, Artificial Sequence
  Synthetic oligonucleotide
  hsa-miR-5683 MIMAT0022472
uacagaugcagauucucugacuuc

SEQ ID NO: 2247 - RNA, 21 nt, Artificial Sequence
  Synthetic oligonucleotide
  hsa-miR-629-5p MIMAT0004810
uggguuuacguugggagaacu

SEQ ID NO: 2248 - RNA, 22 nt, Artificial Sequence
  Synthetic oligonucleotide
  hsa-miR-4675 MIMAT0019757
ggggcugugauugaccagcagg

SEQ ID NO: 2249 - RNA, 23 nt, Artificial Sequence
  Synthetic oligonucleotide
  hsa-miR-6776-3p MIMAT0027453
caaccaccacugucucuccccag

SEQ ID NO: 2250 - RNA, 22 nt, Artificial Sequence
  Synthetic oligonucleotide
  hsa-miR-4423-5p MIMAT0019232
aguugccuuuuuguucccaugc

SEQ ID NO: 2251 - RNA, 24 nt, Artificial Sequence
  Synthetic oligonucleotide
  hsa-miR-5009-5p MIMAT0021041
uuggacuuuuucagauuuggggau

SEQ ID NO: 2252 - RNA, 21 nt, Artificial Sequence
  Synthetic oligonucleotide
  hsa-miR-6780b-3p MIMAT0027573
ucccuugucuccuuucccuag

SEQ ID NO: 2253 - RNA, 22 nt, Artificial Sequence
  Synthetic oligonucleotide
  hsa-miR-655-3p MIMAT0003331
auaauacaugguuaaccucuuu

SEQ ID NO: 2254 - RNA, 23 nt, Artificial Sequence
  Synthetic oligonucleotide
  hsa-miR-181d-5p MIMAT0002821
aacauucauuguugucggugggu

SEQ ID NO: 2255 - RNA, 17 nt, Artificial Sequence
  Synthetic oligonucleotide
  hsa-miR-4443 MIMAT0018961
uuggaggcguggguuuu

SEQ ID NO: 2256 - RNA, 22 nt, Artificial Sequence
  Synthetic oligonucleotide
  hsa-miR-4528 MIMAT0019067
ucauuauauguaugaucuggac

SEQ ID NO: 2257 - RNA, 21 nt, Artificial Sequence
  Synthetic oligonucleotide
  hsa-miR-2116-3p MIMAT0011161
ccucccaugccaagaacuccc

SEQ ID NO: 2258 - RNA, 21 nt, Artificial Sequence
  Synthetic oligonucleotide
  hsa-miR-6895-5p MIMAT0027690
cagggccaggcacagaguaag

SEQ ID NO: 2259 - RNA, 22 nt, Artificial Sequence
  Synthetic oligonucleotide
  hsa-miR-22-5p MIMAT0004495
aguucuucaguggcaagcuuua

SEQ ID NO: 2260 - RNA, 23 nt, Artificial Sequence
  Synthetic oligonucleotide
  hsa-miR-3190-3p MIMAT0022839
uguggaagguagacggccagaga

SEQ ID NO: 2261 - RNA, 21 nt, Artificial Sequence
  Synthetic oligonucleotide
  hsa-miR-548m MIMAT0005917
caaagguauuugugguuuuug

SEQ ID NO: 2262 - RNA, 22 nt, Artificial Sequence
  Synthetic oligonucleotide
  hsa-miR-18b-3p MIMAT0004751
ugcccuaaaugccccuucuggc

SEQ ID NO: 2263 - RNA, 22 nt, Artificial Sequence
  Synthetic oligonucleotide
  hsa-miR-28-5p MIMAT0000085
aaggagcucacagucuauugag

SEQ ID NO: 2264 - RNA, 19 nt, Artificial Sequence
  Synthetic oligonucleotide
  hsa-miR-6070 MIMAT0023695
ccgguuccagucccuggag

SEQ ID NO: 2265 - RNA, 21 nt, Artificial Sequence
  Synthetic oligonucleotide
  hsa-miR-323a-3p MIMAT0000755
cacauuacacggucgaccucu

SEQ ID NO: 2266 - RNA, 22 nt, Artificial Sequence
  Synthetic oligonucleotide
  hsa-miR-8068 MIMAT0030995
uguuuguuguaaggaucguugu

SEQ ID NO: 2267 - RNA, 22 nt, Artificial Sequence
  Synthetic oligonucleotide
  hsa-miR-3173-3p MIMAT0015048
aaaggaggaaauaggcaggcca

SEQ ID NO: 2268 - RNA, 22 nt, Artificial Sequence
  Synthetic oligonucleotide
  hsa-miR-6861-5p MIMAT0027623
acuggguagguggggcuccagg

SEQ ID NO: 2269 - RNA, 23 nt, Artificial Sequence
  Synthetic oligonucleotide
  hsa-miR-6767-5p MIMAT0027434
ucgcagacagggacacauggaga

SEQ ID NO: 2270 - RNA, 21 nt, Artificial Sequence
  Synthetic oligonucleotide
  hsa-miR-8061 MIMAT0030988
cuuagauuagaggauauuguu

SEQ ID NO: 2271 - RNA, 22 nt, Artificial Sequence
  Synthetic oligonucleotide
  hsa-miR-519c-3p MIMAT0002832
aaagugcaucuuuuuagaggau

SEQ ID NO: 2272 - RNA, 21 nt, Artificial Sequence
  Synthetic oligonucleotide
  hsa-miR-6785-3p MIMAT0027471
acaucgccccaccuuccccag

SEQ ID NO: 2273 - RNA, 21 nt, Artificial Sequence
  Synthetic oligonucleotide
  hsa-miR-129-5p MIMAT0000242
cuuuuugcggucugggcuugc

SEQ ID NO: 2274 - RNA, 22 nt, Artificial Sequence
  Synthetic oligonucleotide
  hsa-miR-1295b-3p MIMAT0022294
aauaggccacggaucugggcaa

SEQ ID NO: 2275 - RNA, 22 nt, Artificial Sequence
  Synthetic oligonucleotide
  hsa-miR-4733-5p MIMAT0019857
aaucccaaugcuagacccggug

SEQ ID NO: 2276 - RNA, 19 nt, Artificial Sequence
  Synthetic oligonucleotide
  hsa-miR-7159-3p MIMAT0028229
uuucuauguuaguuggaag

SEQ ID NO: 2277 - RNA, 22 nt, Artificial Sequence
  Synthetic oligonucleotide
  hsa-miR-3136-3p MIMAT0019203
uggcccaaccuauucaguuagu

SEQ ID NO: 2278 - RNA, 25 nt, Artificial Sequence
  Synthetic oligonucleotide
  hsa-miR-658 MIMAT0003336
ggcggagggaaguagguccguuggu

SEQ ID NO: 2279 - RNA, 24 nt, Artificial Sequence
  Synthetic oligonucleotide
  hsa-miR-182-5p MIMAT0000259
uuuggcaaugguagaacucacacu

SEQ ID NO: 2280 - RNA, 21 nt, Artificial Sequence
  Synthetic oligonucleotide
  hsa-miR-548ak MIMAT0019013
aaaaguaacugcgguuuuuga

SEQ ID NO: 2281 - RNA, 21 nt, Artificial Sequence
  Synthetic oligonucleotide
  hsa-miR-5588-5p MIMAT0022295
acuggcauuagugggacuuuu

SEQ ID NO: 2282 - RNA, 25 nt, Artificial Sequence
  Synthetic oligonucleotide
  hsa-miR-3143 MIMAT0015012
auaacauuguaaagcgcuucuuucg

SEQ ID NO: 2283 - RNA, 22 nt, Artificial Sequence
  Synthetic oligonucleotide
  hsa-miR-504-5p MIMAT0002875
agacccuggucugcacucuauc

SEQ ID NO: 2284 - RNA, 22 nt, Artificial Sequence
  Synthetic oligonucleotide
  hsa-miR-411-3p MIMAT0004813
uauguaacacgguccacuaacc

SEQ ID NO: 2285 - RNA, 22 nt, Artificial Sequence
  Synthetic oligonucleotide
  hsa-miR-4439 MIMAT0018957
gugacugauaccuuggaggcau

SEQ ID NO: 2286 - RNA, 22 nt, Artificial Sequence
  Synthetic oligonucleotide
  hsa-miR-7111-3p MIMAT0028120
auccucucuucccuccucccag

SEQ ID NO: 2287 - RNA, 23 nt, Artificial Sequence
  Synthetic oligonucleotide
  hsa-miR-6727-5p MIMAT0027355
cucggggcaggcggcugggagcg

SEQ ID NO: 2288 - RNA, 21 nt, Artificial Sequence
  Synthetic oligonucleotide
  hsa-miR-514a-3p MIMAT0002883
auugacacuucugugaguaga

SEQ ID NO: 2289 - RNA, 21 nt, Artificial Sequence
  Synthetic oligonucleotide
  hsa-miR-4672 MIMAT0019754
uuacacagcuggacagaggca

SEQ ID NO: 2290 - RNA, 22 nt, Artificial Sequence
  Synthetic oligonucleotide
  hsa-miR-4714-3p MIMAT0019823
ccaaccuagguggucagaguug

SEQ ID NO: 2291 - RNA, 22 nt, Artificial Sequence
  Synthetic oligonucleotide
  hsa-miR-4753-3p MIMAT0019891
uucucuuucuuuagccuugugu

SEQ ID NO: 2292 - RNA, 18 nt, Artificial Sequence
  Synthetic oligonucleotide
  hsa-miR-1825 MIMAT0006765
uccagugcccuccucucc

SEQ ID NO: 2293 - RNA, 22 nt, Artificial Sequence
  Synthetic oligonucleotide
  hsa-miR-3925-5p MIMAT0018200
aagagaacugaaaguggagccu

SEQ ID NO: 2294 - RNA, 22 nt, Artificial Sequence
  Synthetic oligonucleotide
  hsa-miR-132-5p MIMAT0004594
accguggcuuucgauuguuacu

SEQ ID NO: 2295 - RNA, 21 nt, Artificial Sequence
  Synthetic oligonucleotide
  hsa-miR-6509-5p MIMAT0025474
auuagguaguggcaguggaac

SEQ ID NO: 2296 - RNA, 22 nt, Artificial Sequence
  Synthetic oligonucleotide
  hsa-miR-4699-5p MIMAT0019794
agaagauugcagaguaaguucc

SEQ ID NO: 2297 - RNA, 20 nt, Artificial Sequence
  Synthetic oligonucleotide
  hsa-miR-5787 MIMAT0023252
gggcuggggcgcggggaggu

SEQ ID NO: 2298 - RNA, 22 nt, Artificial Sequence
  Synthetic oligonucleotide
  hsa-miR-1909-3p MIMAT0007883
cgcaggggccgggugcucaccg

SEQ ID NO: 2299 - RNA, 23 nt, Artificial Sequence
  Synthetic oligonucleotide
  hsa-miR-30c-5p MIMAT0000244
uguaaacauccuacacucucagc

SEQ ID NO: 2300 - RNA, 22 nt, Artificial Sequence
  Synthetic oligonucleotide
  hsa-miR-455-5p MIMAT0003150
uaugugccuuuggacuacaucg

SEQ ID NO: 2301 - RNA, 21 nt, Artificial Sequence
  Synthetic oligonucleotide
  hsa-miR-4761-3p MIMAT0019909
gagggcaugcgcacuuugucc

SEQ ID NO: 2302 - RNA, 22 nt, Artificial Sequence
  Synthetic oligonucleotide
  hsa-miR-4760-3p MIMAT0019907
aaauucauguucaaucuaaacc

SEQ ID NO: 2303 - RNA, 22 nt, Artificial Sequence
  Synthetic oligonucleotide
  hsa-miR-5585-3p MIMAT0022286
cugaauagcugggacuacaggu

SEQ ID NO: 2304 - RNA, 22 nt, Artificial Sequence
  Synthetic oligonucleotide
  hsa-miR-6893-3p MIMAT0027687
cccugcugccuucaccugccag

SEQ ID NO: 2305 - RNA, 20 nt, Artificial Sequence
  Synthetic oligonucleotide
  hsa-miR-6889-3p MIMAT0027679
ucugugccccuacuucccag

SEQ ID NO: 2306 - RNA, 20 nt, Artificial Sequence
  Synthetic oligonucleotide
  hsa-miR-1911-3p MIMAT0007886
caccaggcauuguggucucc

SEQ ID NO: 2307 - RNA, 22 nt, Artificial Sequence
  Synthetic oligonucleotide
  hsa-miR-195-3p MIMAT0004615
ccaauauuggcugugcugcucc

SEQ ID NO: 2308 - RNA, 22 nt, Artificial Sequence
  Synthetic oligonucleotide
  hsa-miR-1303 MIMAT0005891
uuuagagacggggucuugcucu

SEQ ID NO: 2309 - RNA, 23 nt, Artificial Sequence
  Synthetic oligonucleotide
  hsa-miR-5589-3p MIMAT0022298
ugcacauggcaaccuagcuccca

SEQ ID NO: 2310 - RNA, 21 nt, Artificial Sequence
  Synthetic oligonucleotide
  hsa-miR-4649-3p MIMAT0019712
ucugaggccugccucucccca

SEQ ID NO: 2311 - RNA, 23 nt, Artificial Sequence
  Synthetic oligonucleotide
  hsa-miR-548aj-5p MIMAT0022739
ugcaaaaguaauugcaguuuuug

SEQ ID NO: 2312 - RNA, 22 nt, Artificial Sequence
  Synthetic oligonucleotide
  hsa-miR-4747-3p MIMAT0019883
aaggcccgggcuuuccucccag

SEQ ID NO: 2313 - RNA, 28 nt, Artificial Sequence
  Synthetic oligonucleotide
  hsa-miR-7161-3p MIMAT0028233
uagaucuuugacucuggcagucuccagg

SEQ ID NO: 2314 - RNA, 21 nt, Artificial Sequence
  Synthetic oligonucleotide
  hsa-miR-1295a MIMAT0005885
uuaggccgcagaucuggguga

SEQ ID NO: 2315 - RNA, 22 nt, Artificial Sequence
  Synthetic oligonucleotide
  hsa-miR-376b-5p MIMAT0022923
cguggauauuccuucuauguuu

SEQ ID NO: 2316 - RNA, 22 nt, Artificial Sequence
  Synthetic oligonucleotide
  hsa-miR-4637 MIMAT0019694
uacuaacugcagauucaaguga

SEQ ID NO: 2317 - RNA, 21 nt, Artificial Sequence
  Synthetic oligonucleotide
  hsa-miR-6800-5p MIMAT0027500
guaggugacagucaggggcgg

SEQ ID NO: 2318 - RNA, 22 nt, Artificial Sequence
  Synthetic oligonucleotide
  hsa-miR-506-5p MIMAT0022701
uauucaggaagguguuacuuaa

SEQ ID NO: 2319 - RNA, 23 nt, Artificial Sequence
  Synthetic oligonucleotide
  hsa-miR-1182 MIMAT0005827
gagggucuugggagggaugugac

SEQ ID NO: 2320 - RNA, 22 nt, Artificial Sequence
  Synthetic oligonucleotide
  hsa-miR-653-3p MIMAT0026625
uucacuggaguuuguuucaaua

SEQ ID NO: 2321 - RNA, 22 nt, Artificial Sequence
  Synthetic oligonucleotide
  hsa-miR-6871-3p MIMAT0027643
cagcacccuguggcucccacag

SEQ ID NO: 2322 - RNA, 22 nt, Artificial Sequence
  Synthetic oligonucleotide
  hsa-miR-299-5p MIMAT0002890
ugguuuaccgucccacauacau

SEQ ID NO: 2323 - RNA, 22 nt, Artificial Sequence
  Synthetic oligonucleotide
  hsa-miR-6803-5p MIMAT0027506
cuggggguggggggcugggcgu

SEQ ID NO: 2324 - RNA, 22 nt, Artificial Sequence
  Synthetic oligonucleotide
  hsa-miR-548p MIMAT0005934
uagcaaaaacugcaguuacuuu

SEQ ID NO: 2325 - RNA, 21 nt, Artificial Sequence
  Synthetic oligonucleotide
  hsa-miR-4470 MIMAT0018997
uggcaaacguggaagccgaga

SEQ ID NO: 2326 - RNA, 21 nt, Artificial Sequence
  Synthetic oligonucleotide
  hsa-miR-6788-5p MIMAT0027476
cugggagaagaguggugaaga

SEQ ID NO: 2327 - RNA, 21 nt, Artificial Sequence
  Synthetic oligonucleotide
  hsa-miR-1203 MIMAT0005866
cccggagccaggaugcagcuc

SEQ ID NO: 2328 - RNA, 24 nt, Artificial Sequence
  Synthetic oligonucleotide
  hsa-miR-3137 MIMAT0015005
ucuguagccugggagcaauggggu

SEQ ID NO: 2329 - RNA, 22 nt, Artificial Sequence
  Synthetic oligonucleotide
  hsa-miR-615-3p MIMAT0003283
uccgagccugggucucccucuu

SEQ ID NO: 2330 - RNA, 22 nt, Artificial Sequence
  Synthetic oligonucleotide
  hsa-miR-1185-2-3p MIMAT0022713
auauacagggggagacucucau

SEQ ID NO: 2331 - RNA, 22 nt, Artificial Sequence
  Synthetic oligonucleotide
  hsa-miR-5691 MIMAT0022483
uugcucugagcuccgagaaagc

SEQ ID NO: 2332 - RNA, 19 nt, Artificial Sequence
  Synthetic oligonucleotide
  hsa-miR-6776-5p MIMAT0027452
ucugggugcaguggggguu

SEQ ID NO: 2333 - RNA, 22 nt, Artificial Sequence
  Synthetic oligonucleotide
  hsa-miR-548ad-3p MIMAT0018946
gaaaacgacaaugacuuuugca

SEQ ID NO: 2334 - RNA, 22 nt, Artificial Sequence
  Synthetic oligonucleotide
  hsa-miR-524-5p MIMAT0002849
cuacaaagggaagcacuuucuc

SEQ ID NO: 2335 - RNA, 22 nt, Artificial Sequence
  Synthetic oligonucleotide
  hsa-miR-3685 MIMAT0018113
uuuccuacccuaccugaagacu

SEQ ID NO: 2336 - RNA, 18 nt, Artificial Sequence
  Synthetic oligonucleotide
  hsa-miR-7977 MIMAT0031180
uucccagccaacgcacca

SEQ ID NO: 2337 - RNA, 22 nt, Artificial Sequence
  Synthetic oligonucleotide
  hsa-miR-4787-5p MIMAT0019956
gcggggguggcggcggcauccc

SEQ ID NO: 2338 - RNA, 22 nt, Artificial Sequence
  Synthetic oligonucleotide
  hsa-miR-519d-3p MIMAT0002853
caaagugccucccuuuagagug

SEQ ID NO: 2339 - RNA, 23 nt, Artificial Sequence
  Synthetic oligonucleotide
  hsa-miR-449c-3p MIMAT0013771
uugcuaguugcacuccucucugu

SEQ ID NO: 2340 - RNA, 22 nt, Artificial Sequence
  Synthetic oligonucleotide
  hsa-miR-5581-3p MIMAT0022276
uuccaugccuccuagaaguucc

SEQ ID NO: 2341 - RNA, 22 nt, Artificial Sequence
  Synthetic oligonucleotide
  hsa-miR-10b-3p MIMAT0004556
acagauucgauucuaggggaau

SEQ ID NO: 2342 - RNA, 22 nt, Artificial Sequence
  Synthetic oligonucleotide
  hsa-miR-454-5p MIMAT0003884
acccuaucaauauugucucugc

SEQ ID NO: 2343 - RNA, 22 nt, Artificial Sequence
  Synthetic oligonucleotide
  hsa-miR-548ay-3p MIMAT0025453
caaaaccgcgauuacucuugca

SEQ ID NO: 2344 - RNA, 22 nt, Artificial Sequence
  Synthetic oligonucleotide
  hsa-miR-5579-3p MIMAT0022270
uuagcuuaaggaguaccagauc

SEQ ID NO: 2345 - RNA, 17 nt, Artificial Sequence
  Synthetic oligonucleotide
  hsa-miR-4451 MIMAT0018973
ugguagagcugaggaca

SEQ ID NO: 2346 - RNA, 22 nt, Artificial Sequence
  Synthetic oligonucleotide
  hsa-miR-5100 MIMAT0022259
uucagaucccagcggugccucu

SEQ ID NO: 2347 - RNA, 22 nt, Artificial Sequence
  Synthetic oligonucleotide
  hsa-miR-1273e MIMAT0018079
uugcuugaacccaggaagugga

SEQ ID NO: 2348 - RNA, 22 nt, Artificial Sequence
  Synthetic oligonucleotide
  hsa-miR-337-3p MIMAT0000754
cuccuauaugaugccuuucuuc

SEQ ID NO: 2349 - RNA, 22 nt, Artificial Sequence
  Synthetic oligonucleotide
  hsa-miR-92a-3p MIMAT0000092
uauugcacuugucccggccugu

SEQ ID NO: 2350 - RNA, 21 nt, Artificial Sequence
  Synthetic oligonucleotide
  hsa-miR-6852-5p MIMAT0027604
cccugggguucugaggacaug

SEQ ID NO: 2351 - RNA, 24 nt, Artificial Sequence
  Synthetic oligonucleotide
  hsa-miR-4763-3p MIMAT0019913
aggcaggggcuggugcugggcggg

SEQ ID NO: 2352 - RNA, 17 nt, Artificial Sequence
  Synthetic oligonucleotide
  hsa-miR-302f MIMAT0005932
uaauugcuuccauguuu

SEQ ID NO: 2353 - RNA, 22 nt, Artificial Sequence
  Synthetic oligonucleotide
  hsa-miR-660-5p MIMAT0003338
uacccauugcauaucggaguug

SEQ ID NO: 2354 - RNA, 22 nt, Artificial Sequence
  Synthetic oligonucleotide
  hsa-miR-548i MIMAT0005935
aaaaguaauugcggauuuugcc

SEQ ID NO: 2355 - RNA, 24 nt, Artificial Sequence
  Synthetic oligonucleotide
  hsa-miR-6089 MIMAT0023714
ggaggccgggguggggcggggcgg

SEQ ID NO: 2356 - RNA, 21 nt, Artificial Sequence
  Synthetic oligonucleotide
  hsa-miR-520a-5p MIMAT0002833
cuccagagggaaguacuuucu

SEQ ID NO: 2357 - RNA, 22 nt, Artificial Sequence
  Synthetic oligonucleotide
  hsa-miR-4533 MIMAT0019072
uggaaggagguugccggacgcu

SEQ ID NO: 2358 - RNA, 23 nt, Artificial Sequence
  Synthetic oligonucleotide
  hsa-miR-7153-5p MIMAT0028216
ugagaacugacaaaugugguagg

SEQ ID NO: 2359 - RNA, 21 nt, Artificial Sequence
  Synthetic oligonucleotide
  hsa-miR-151a-3p MIMAT0000757
cuagacugaagcuccuugagg

SEQ ID NO: 2360 - RNA, 18 nt, Artificial Sequence
  Synthetic oligonucleotide
  hsa-miR-3155b MIMAT0019012
ccaggcucugcaguggga

SEQ ID NO: 2361 - RNA, 22 nt, Artificial Sequence
  Synthetic oligonucleotide
  hsa-miR-3941 MIMAT0018357
uuacacacaacugaggaucaua

SEQ ID NO: 2362 - RNA, 22 nt, Artificial Sequence
  Synthetic oligonucleotide
  hsa-miR-200c-5p MIMAT0004657
cgucuuacccagcaguguuugg

SEQ ID NO: 2363 - RNA, 18 nt, Artificial Sequence
  Synthetic oligonucleotide
  hsa-miR-1178-5p MIMAT0022940
cagggucagcugagcaug

SEQ ID NO: 2364 - RNA, 22 nt, Artificial Sequence
  Synthetic oligonucleotide
  hsa-miR-26b-3p MIMAT0004500
ccuguucuccauuacuuggcuc

SEQ ID NO: 2365 - RNA, 22 nt, Artificial Sequence
  Synthetic oligonucleotide
  hsa-miR-8077 MIMAT0031004
ggcugagugggguucugacucc

SEQ ID NO: 2366 - RNA, 21 nt, Artificial Sequence
  Synthetic oligonucleotide
  hsa-miR-1468-5p MIMAT0006789
cuccguuugccuguuucgcug

SEQ ID NO: 2367 - RNA, 21 nt, Artificial Sequence
  Synthetic oligonucleotide
  hsa-miR-6715b-5p MIMAT0025842
acaggcacgacugguuuggca

SEQ ID NO: 2368 - RNA, 22 nt, Artificial Sequence
  Synthetic oligonucleotide
  hsa-miR-523-5p MIMAT0005449
cucuagagggaagcgcuuucug

SEQ ID NO: 2369 - RNA, 20 nt, Artificial Sequence
  Synthetic oligonucleotide
  hsa-miR-6794-3p MIMAT0027489
cucacucucagucccucccu

SEQ ID NO: 2370 - RNA, 22 nt, Artificial Sequence
  Synthetic oligonucleotide
  hsa-miR-4796-3p MIMAT0019971
uaaaguggcagaguauagacac

SEQ ID NO: 2371 - RNA, 17 nt, Artificial Sequence
  Synthetic oligonucleotide
  hsa-miR-4262 MIMAT0016894
gacauucagacuaccug

SEQ ID NO: 2372 - RNA, 22 nt, Artificial Sequence
  Synthetic oligonucleotide
  hsa-miR-582-3p MIMAT0004797
uaacugguugaacaacugaacc

SEQ ID NO: 2373 - RNA, 21 nt, Artificial Sequence
  Synthetic oligonucleotide
  hsa-miR-4433a-3p MIMAT0018949
acaggagugggggugggacau

SEQ ID NO: 2374 - RNA, 22 nt, Artificial Sequence
  Synthetic oligonucleotide
  hsa-miR-106b-3p MIMAT0004672
ccgcacuguggguacuugcugc

SEQ ID NO: 2375 - RNA, 21 nt, Artificial Sequence
  Synthetic oligonucleotide
  hsa-miR-6854-3p MIMAT0027609
ugcguuucuccucuugagcag

SEQ ID NO: 2376 - RNA, 21 nt, Artificial Sequence
  Synthetic oligonucleotide
  hsa-miR-5571-5p MIMAT0022257
caauucucaaaggagccuccc

SEQ ID NO: 2377 - RNA, 22 nt, Artificial Sequence
  Synthetic oligonucleotide
  hsa-miR-3148 MIMAT0015021
uggaaaaaacuggugugugcuu

SEQ ID NO: 2378 - RNA, 22 nt, Artificial Sequence
  Synthetic oligonucleotide
  hsa-miR-433-5p MIMAT0026554
uacggugagccugucauuauuc

SEQ ID NO: 2379 - RNA, 22 nt, Artificial Sequence
  Synthetic oligonucleotide
  hsa-miR-1269b MIMAT0019059
cuggacugagccaugcuacugg

SEQ ID NO: 2380 - RNA, 22 nt, Artificial Sequence
  Synthetic oligonucleotide
  hsa-miR-4762-3p MIMAT0019911
cuucugaucaagauuuguggug

SEQ ID NO: 2381 - RNA, 22 nt, Artificial Sequence
  Synthetic oligonucleotide
  hsa-miR-942-5p MIMAT0004985
ucuucucuguuuuggccaugug

SEQ ID NO: 2382 - RNA, 20 nt, Artificial Sequence
  Synthetic oligonucleotide
  hsa-miR-4324 MIMAT0016876
cccugagacccuaaccuuaa

SEQ ID NO: 2383 - RNA, 22 nt, Artificial Sequence
  Synthetic oligonucleotide
  hsa-miR-129-2-3p MIMAT0004605
aagcccuuaccccaaaaagcau

SEQ ID NO: 2384 - RNA, 21 nt, Artificial Sequence
  Synthetic oligonucleotide
  hsa-miR-6739-3p MIMAT0027380
auuguucugucuuucucccag

SEQ ID NO: 2385 - RNA, 23 nt, Artificial Sequence
  Synthetic oligonucleotide
  hsa-miR-3177-5p MIMAT0019215
uguguacacacgugccaggcgcu

SEQ ID NO: 2386 - RNA, 17 nt, Artificial Sequence
  Synthetic oligonucleotide
  hsa-miR-4492 MIMAT0019027
ggggcugggcgcgcgcc

SEQ ID NO: 2387 - RNA, 22 nt, Artificial Sequence
  Synthetic oligonucleotide
  hsa-miR-4779 MIMAT0019938
uaggagggaauaguaaaagcag

SEQ ID NO: 2388 - RNA, 22 nt, Artificial Sequence
  Synthetic oligonucleotide
  hsa-miR-3126-3p MIMAT0015377
caucuggcauccgucacacaga

SEQ ID NO: 2389 - RNA, 23 nt, Artificial Sequence
  Synthetic oligonucleotide
  hsa-miR-6760-5p MIMAT0027420
cagggagaagguggaagugcaga

SEQ ID NO: 2390 - RNA, 22 nt, Artificial Sequence
  Synthetic oligonucleotide
  hsa-miR-5001-3p MIMAT0021022
uucugccucuguccagguccuu

SEQ ID NO: 2391 - RNA, 24 nt, Artificial Sequence
  Synthetic oligonucleotide
  hsa-miR-3145-3p MIMAT0015016
agauauuuugaguguuuggaauug

SEQ ID NO: 2392 - RNA, 22 nt, Artificial Sequence
  Synthetic oligonucleotide
  hsa-miR-7109-3p MIMAT0028116
caagccucuccugcccuuccag

SEQ ID NO: 2393 - RNA, 22 nt, Artificial Sequence
  Synthetic oligonucleotide
  hsa-miR-4670-5p MIMAT0019750
aagcgaccaugauguaacuuca

SEQ ID NO: 2394 - RNA, 22 nt, Artificial Sequence
  Synthetic oligonucleotide
  hsa-miR-98-5p MIMAT0000096
ugagguaguaaguuguauuguu

SEQ ID NO: 2395 - RNA, 22 nt, Artificial Sequence
  Synthetic oligonucleotide
  hsa-miR-6827-5p MIMAT0027554
ugggagccaugagggucugugc

SEQ ID NO: 2396 - RNA, 22 nt, Artificial Sequence
  Synthetic oligonucleotide
  hsa-miR-29a-3p MIMAT0000086
uagcaccaucugaaaucgguua

SEQ ID NO: 2397 - RNA, 23 nt, Artificial Sequence
  Synthetic oligonucleotide
  hsa-miR-7113-3p MIMAT0028124
ccucccugcccgccucucugcag

SEQ ID NO: 2398 - RNA, 24 nt, Artificial Sequence
  Synthetic oligonucleotide
  hsa-miR-362-5p MIMAT0000705
aauccuuggaaccuaggugugagu

SEQ ID NO: 2399 - RNA, 21 nt, Artificial Sequence
  Synthetic oligonucleotide
  hsa-miR-1286 MIMAT0005877
ugcaggaccaagaugagcccu

SEQ ID NO: 2400 - RNA, 22 nt, Artificial Sequence
  Synthetic oligonucleotide
  hsa-miR-505-3p MIMAT0002876
cgucaacacuugcugguuuccu

SEQ ID NO: 2401 - RNA, 23 nt, Artificial Sequence
  Synthetic oligonucleotide
  hsa-miR-3675-5p MIMAT0018098
uauggggcuucuguagagauuuc

SEQ ID NO: 2402 - RNA, 22 nt, Artificial Sequence
  Synthetic oligonucleotide
  hsa-miR-7855-5p MIMAT0030430
uuggugaggaccccaagcucgg

SEQ ID NO: 2403 - RNA, 22 nt, Artificial Sequence
  Synthetic oligonucleotide
  hsa-miR-15a-5p MIMAT0000068
uagcagcacauaaugguuugug

SEQ ID NO: 2404 - RNA, 22 nt, Artificial Sequence
  Synthetic oligonucleotide
  hsa-miR-548as-5p MIMAT0022267
aaaaguaauugcggguuuugcc

SEQ ID NO: 2405 - RNA, 22 nt, Artificial Sequence
  Synthetic oligonucleotide
  hsa-miR-642b-5p MIMAT0022736
gguucccucuccaaaugugucu

SEQ ID NO: 2406 - RNA, 24 nt, Artificial Sequence
  Synthetic oligonucleotide
  hsa-miR-619-3p MIMAT0003288
gaccuggacauguuugugcccagu

SEQ ID NO: 2407 - RNA, 20 nt, Artificial Sequence
  Synthetic oligonucleotide
  hsa-miR-550a-3-5p MIMAT0020925
agugccugagggaguaagag

SEQ ID NO: 2408 - RNA, 20 nt, Artificial Sequence
  Synthetic oligonucleotide
  hsa-miR-3622b-5p MIMAT0018005
aggcaugggaggucagguga

SEQ ID NO: 2409 - RNA, 23 nt, Artificial Sequence
  Synthetic oligonucleotide
  hsa-miR-6777-5p MIMAT0027454
acggggagucaggcaguggugga

SEQ ID NO: 2410 - RNA, 22 nt, Artificial Sequence
  Synthetic oligonucleotide
  hsa-miR-302d-5p MIMAT0004685
acuuuaacauggaggcacuugc

SEQ ID NO: 2411 - RNA, 20 nt, Artificial Sequence
  Synthetic oligonucleotide
  hsa-miR-147a MIMAT0000251
guguguggaaaugcuucugc

SEQ ID NO: 2412 - RNA, 25 nt, Artificial Sequence
  Synthetic oligonucleotide
  hsa-miR-1273a MIMAT0005926
gggcgacaaagcaagacucuuucuu

SEQ ID NO: 2413 - RNA, 23 nt, Artificial Sequence
  Synthetic oligonucleotide
  hsa-miR-432-5p MIMAT0002814
ucuuggaguaggucauugggugg

SEQ ID NO: 2414 - RNA, 21 nt, Artificial Sequence
  Synthetic oligonucleotide
  hsa-miR-204-3p MIMAT0022693
gcugggaaggcaaagggacgu

SEQ ID NO: 2415 - RNA, 23 nt, Artificial Sequence
  Synthetic oligonucleotide
  hsa-miR-3663-3p MIMAT0018085
ugagcaccacacaggccgggcgc

SEQ ID NO: 2416 - RNA, 23 nt, Artificial Sequence
  Synthetic oligonucleotide
  hsa-miR-5093 MIMAT0021085
aggaaaugaggcuggcuaggagc

SEQ ID NO: 2417 - RNA, 22 nt, Artificial Sequence
  Synthetic oligonucleotide
  hsa-miR-1913 MIMAT0007888
ucugcccccuccgcugcugcca

SEQ ID NO: 2418 - RNA, 22 nt, Artificial Sequence
  Synthetic oligonucleotide
  hsa-miR-4529-5p MIMAT0019236
aggccaucagcaguccaaugaa

SEQ ID NO: 2419 - RNA, 23 nt, Artificial Sequence
  Synthetic oligonucleotide
  hsa-miR-4666b MIMAT0022485
uugcaugucagauuguaauuccc

SEQ ID NO: 2420 - RNA, 21 nt, Artificial Sequence
  Synthetic oligonucleotide
  hsa-miR-6886-5p MIMAT0027672
cccgcaggugagaugagggcu

SEQ ID NO: 2421 - RNA, 18 nt, Artificial Sequence
  Synthetic oligonucleotide
  hsa-miR-4309 MIMAT0016859
cuggagucuaggauucca

SEQ ID NO: 2422 - RNA, 24 nt, Artificial Sequence
  Synthetic oligonucleotide
  hsa-miR-3184-5p MIMAT0015064
ugaggggccucagaccgagcuuuu

SEQ ID NO: 2423 - RNA, 20 nt, Artificial Sequence
  Synthetic oligonucleotide
  hsa-miR-4633-5p MIMAT0019689
auaugccuggcuagcuccuc

SEQ ID NO: 2424 - RNA, 19 nt, Artificial Sequence
  Synthetic oligonucleotide
  hsa-miR-4290 MIMAT0016921
ugcccuccuuucuucccuc

SEQ ID NO: 2425 - RNA, 22 nt, Artificial Sequence
  Synthetic oligonucleotide
  hsa-miR-345-3p MIMAT0022698
gcccugaacgaggggucuggag

SEQ ID NO: 2426 - RNA, 19 nt, Artificial Sequence
  Synthetic oligonucleotide
  hsa-miR-3176 MIMAT0015053
acuggccugggacuaccgg

SEQ ID NO: 2427 - RNA, 21 nt, Artificial Sequence
  Synthetic oligonucleotide
  hsa-miR-6824-3p MIMAT0027549
ucucuggucuugccaccccag

SEQ ID NO: 2428 - RNA, 21 nt, Artificial Sequence
  Synthetic oligonucleotide
  hsa-miR-502-5p MIMAT0002873
auccuugcuaucugggugcua

SEQ ID NO: 2429 - RNA, 19 nt, Artificial Sequence
  Synthetic oligonucleotide
  hsa-miR-7641 MIMAT0029782
uugaucucggaagcuaagc

SEQ ID NO: 2430 - RNA, 22 nt, Artificial Sequence
  Synthetic oligonucleotide
  hsa-miR-1180-3p MIMAT0005825
uuuccggcucgcgugggugugu

SEQ ID NO: 2431 - RNA, 21 nt, Artificial Sequence
  Synthetic oligonucleotide
  hsa-miR-4464 MIMAT0018988
aagguuuggauagaugcaaua

SEQ ID NO: 2432 - RNA, 21 nt, Artificial Sequence
  Synthetic oligonucleotide
  hsa-miR-5187-3p MIMAT0021118
acugaauccucuuuuccucag

SEQ ID NO: 2433 - RNA, 21 nt, Artificial Sequence
  Synthetic oligonucleotide
  hsa-miR-3944-5p MIMAT0019231
ugugcagcaggccaaccgaga

SEQ ID NO: 2434 - RNA, 23 nt, Artificial Sequence
  Synthetic oligonucleotide
  hsa-miR-664a-3p MIMAT0005949
uauucauuuauccccagccuaca

SEQ ID NO: 2435 - RNA, 22 nt, Artificial Sequence
  Synthetic oligonucleotide
  hsa-miR-548at-5p MIMAT0022277
aaaaguuauugcgguuuuggcu

SEQ ID NO: 2436 - RNA, 20 nt, Artificial Sequence
  Synthetic oligonucleotide
  hsa-miR-591 MIMAT0003259
agaccauggguucucauugu

SEQ ID NO: 2437 - RNA, 22 nt, Artificial Sequence
  Synthetic oligonucleotide
  hsa-miR-143-5p MIMAT0004599
ggugcagugcugcaucucuggu

SEQ ID NO: 2438 - RNA, 22 nt, Artificial Sequence
  Synthetic oligonucleotide
  hsa-miR-383-5p MIMAT0000738
agaucagaaggugauuguggcu

SEQ ID NO: 2439 - DNA, 22 bp, Artificial Sequence
  Synthetic oligonucleotide
  hsa-miR-4753-5p MIMAT0019890
caaggccaaaggaagagaacag

SEQ ID NO: 2440 - RNA, 25 nt, Artificial Sequence
  Synthetic oligonucleotide
  hsa-miR-6885-5p MIMAT0027670
aggggggcacugcgcaagcaaagcc

SEQ ID NO: 2441 - RNA, 23 nt, Artificial Sequence
  Synthetic oligonucleotide
  hsa-miR-503-5p MIMAT0002874
uagcagcgggaacaguucugcag

SEQ ID NO: 2442 - RNA, 21 nt, Artificial Sequence
  Synthetic oligonucleotide
  hsa-miR-6875-5p MIMAT0027650
ugagggacccaggacaggaga

SEQ ID NO: 2443 - RNA, 22 nt, Artificial Sequence
  Synthetic oligonucleotide
  hsa-miR-1234-3p MIMAT0005589
ucggccugaccacccaccccac

SEQ ID NO: 2444 - RNA, 22 nt, Artificial Sequence
  Synthetic oligonucleotide
  hsa-miR-19a-5p MIMAT0004490
aguuuugcauaguugcacuaca

SEQ ID NO: 2445 - RNA, 21 nt, Artificial Sequence
  Synthetic oligonucleotide
  hsa-miR-6779-5p MIMAT0027458
cugggaggggcuggguuuggc

SEQ ID NO: 2446 - RNA, 20 nt, Artificial Sequence
  Synthetic oligonucleotide
  hsa-miR-1233-3p MIMAT0005588
ugagcccuguccucccgcag

SEQ ID NO: 2447 - RNA, 23 nt, Artificial Sequence
  Synthetic oligonucleotide
  hsa-miR-6769b-5p MIMAT0027620
ugguggguggggaggagaagugc

SEQ ID NO: 2448 - RNA, 22 nt, Artificial Sequence
  Synthetic oligonucleotide
  hsa-miR-133a-5p MIMAT0026478
agcugguaaaauggaaccaaau

SEQ ID NO: 2449 - RNA, 19 nt, Artificial Sequence
  Synthetic oligonucleotide
  hsa-miR-2861 MIMAT0013802
ggggccuggcggugggcgg

SEQ ID NO: 2450 - RNA, 23 nt, Artificial Sequence
  Synthetic oligonucleotide
  hsa-miR-6501-3p MIMAT0025459
ccagagcagccugcgguaacagu

SEQ ID NO: 2451 - RNA, 19 nt, Artificial Sequence
  Synthetic oligonucleotide
  hsa-miR-1260b MIMAT0015041
aucccaccacugccaccau

SEQ ID NO: 2452 - RNA, 21 nt, Artificial Sequence
  Synthetic oligonucleotide
  hsa-miR-4536-3p MIMAT0020959
ucgugcauauaucuaccacau

SEQ ID NO: 2453 - RNA, 22 nt, Artificial Sequence
  Synthetic oligonucleotide
  hsa-miR-185-3p MIMAT0004611
aggggcuggcuuuccucugguc

SEQ ID NO: 2454 - RNA, 21 nt, Artificial Sequence
  Synthetic oligonucleotide
  hsa-miR-4529-3p MIMAT0019068
auuggacugcugauggcccgu

SEQ ID NO: 2455 - RNA, 25 nt, Artificial Sequence
  Synthetic oligonucleotide
  hsa-miR-1273d MIMAT0015090
gaacccaugagguugaggcugcagu

SEQ ID NO: 2456 - RNA, 22 nt, Artificial Sequence
  Synthetic oligonucleotide
  hsa-miR-1243 MIMAT0005894
aacuggaucaauuauaggagug

SEQ ID NO: 2457 - RNA, 22 nt, Artificial Sequence
  Synthetic oligonucleotide
  hsa-miR-4738-5p MIMAT0019866
accagcgcguuuucaguuucau

SEQ ID NO: 2458 - RNA, 22 nt, Artificial Sequence
  Synthetic oligonucleotide
  hsa-miR-761 MIMAT0010364
gcagcagggugaaacugacaca

SEQ ID NO: 2459 - RNA, 21 nt, Artificial Sequence
  Synthetic oligonucleotide
  hsa-miR-5190 MIMAT0021121
ccagugacugagcuggagcca

SEQ ID NO: 2460 - RNA, 22 nt, Artificial Sequence
  Synthetic oligonucleotide
  hsa-miR-6835-5p MIMAT0027570
aggggguagaaaguggcugaag

SEQ ID NO: 2461 - RNA, 21 nt, Artificial Sequence
  Synthetic oligonucleotide
  hsa-miR-4712-3p MIMAT0019819
aaugagagaccuguacuguau

SEQ ID NO: 2462 - RNA, 21 nt, Artificial Sequence
  Synthetic oligonucleotide
  hsa-miR-6750-3p MIMAT0027401
gaacucacccucugcucccag

SEQ ID NO: 2463 - RNA, 21 nt, Artificial Sequence
  Synthetic oligonucleotide
  hsa-miR-6778-3p MIMAT0027457
ugccucccugacauuccacag

SEQ ID NO: 2464 - RNA, 17 nt, Artificial Sequence
  Synthetic oligonucleotide
  hsa-miR-4481 MIMAT0019015
ggagugggcuggugguu

SEQ ID NO: 2465 - RNA, 22 nt, Artificial Sequence
  Synthetic oligonucleotide
  hsa-miR-449b-5p MIMAT0003327
aggcaguguauuguuagcuggc

SEQ ID NO: 2466 - RNA, 22 nt, Artificial Sequence
  Synthetic oligonucleotide
  hsa-miR-4636 MIMAT0019693
aacucguguucaaagccuuuag

SEQ ID NO: 2467 - RNA, 22 nt, Artificial Sequence
  Synthetic oligonucleotide
  hsa-miR-6719-3p MIMAT0025850
ucugacaucagugauucuccug

SEQ ID NO: 2468 - RNA, 22 nt, Artificial Sequence
  Synthetic oligonucleotide
  hsa-miR-4652-5p MIMAT0019716
aggggacugguuaauagaacua

SEQ ID NO: 2469 - RNA, 17 nt, Artificial Sequence
  Synthetic oligonucleotide
  hsa-miR-4318 MIMAT0016869
cacuguggguacaugcu

SEQ ID NO: 2470 - RNA, 18 nt, Artificial Sequence
  Synthetic oligonucleotide
  hsa-miR-7153-3p MIMAT0028217
caccauggacgguuuacc

SEQ ID NO: 2471 - RNA, 22 nt, Artificial Sequence
  Synthetic oligonucleotide
  hsa-miR-1262 MIMAT0005914
augggugaauuuguagaaggau

SEQ ID NO: 2472 - RNA, 22 nt, Artificial Sequence
  Synthetic oligonucleotide
  hsa-miR-4795-3p MIMAT0019969
auauuauuagccacuucuggau

SEQ ID NO: 2473 - RNA, 22 nt, Artificial Sequence
  Synthetic oligonucleotide
  hsa-miR-29c-5p MIMAT0004673
ugaccgauuucuccugguguuc

SEQ ID NO: 2474 - RNA, 22 nt, Artificial Sequence
  Synthetic oligonucleotide
  hsa-miR-374b-5p MIMAT0004955
auauaauacaaccugcuaagug

SEQ ID NO: 2475 - RNA, 22 nt, Artificial Sequence
  Synthetic oligonucleotide
  hsa-miR-30c-1-3p MIMAT0004674
cugggagaggguuguuuacucc

SEQ ID NO: 2476 - RNA, 22 nt, Artificial Sequence
  Synthetic oligonucleotide
  hsa-miR-616-3p MIMAT0004805
agucauuggaggguuugagcag

SEQ ID NO: 2477 - RNA, 23 nt, Artificial Sequence
  Synthetic oligonucleotide
  hsa-miR-548w MIMAT0015060
aaaaguaacugcgguuuuugccu

SEQ ID NO: 2478 - RNA, 22 nt, Artificial Sequence
  Synthetic oligonucleotide
  hsa-miR-561-5p MIMAT0022706
aucaaggaucuuaaacuuugcc

SEQ ID NO: 2479 - RNA, 22 nt, Artificial Sequence
  Synthetic oligonucleotide
  hsa-miR-4445-5p MIMAT0018963
agauuguuucuuuugccgugca

SEQ ID NO: 2480 - RNA, 22 nt, Artificial Sequence
  Synthetic oligonucleotide
  hsa-miR-4786-3p MIMAT0019955
ugaagccagcucuggucugggc

SEQ ID NO: 2481 - RNA, 22 nt, Artificial Sequence
  Synthetic oligonucleotide
  hsa-miR-23b-5p MIMAT0004587
uggguuccuggcaugcugauuu

SEQ ID NO: 2482 - RNA, 23 nt, Artificial Sequence
  Synthetic oligonucleotide
  hsa-miR-802 MIMAT0004185
caguaacaaagauucauccuugu

SEQ ID NO: 2483 - RNA, 22 nt, Artificial Sequence
  Synthetic oligonucleotide
  hsa-miR-125b-5p MIMAT0000423
ucccugagacccuaacuuguga

SEQ ID NO: 2484 - RNA, 21 nt, Artificial Sequence
  Synthetic oligonucleotide
  hsa-miR-596 MIMAT0003264
aagccugcccggcuccucggg

SEQ ID NO: 2485 - RNA, 21 nt, Artificial Sequence
  Synthetic oligonucleotide
  hsa-miR-6804-5p MIMAT0027508
ugagggugucagcaggugacg

SEQ ID NO: 2486 - RNA, 24 nt, Artificial Sequence
  Synthetic oligonucleotide
  hsa-miR-3651 MIMAT0018071
cauagcccggucgcugguacauga

SEQ ID NO: 2487 - RNA, 22 nt, Artificial Sequence
  Synthetic oligonucleotide
  hsa-miR-545-5p MIMAT0004785
ucaguaaauguuuauuagauga

SEQ ID NO: 2488 - RNA, 22 nt, Artificial Sequence
  Synthetic oligonucleotide
  hsa-miR-371b-5p MIMAT0019892
acucaaaagauggcggcacuuu

SEQ ID NO: 2489 - RNA, 22 nt, Artificial Sequence
  Synthetic oligonucleotide
  hsa-miR-4773 MIMAT0019928
cagaacaggagcauagaaaggc

SEQ ID NO: 2490 - RNA, 18 nt, Artificial Sequence
  Synthetic oligonucleotide
  hsa-miR-4468 MIMAT0018995
agagcagaaggaugagau

SEQ ID NO: 2491 - RNA, 25 nt, Artificial Sequence
  Synthetic oligonucleotide
  hsa-miR-519d-5p MIMAT0026610
ccuccaaagggaagcgcuuucuguu

SEQ ID NO: 2492 - RNA, 22 nt, Artificial Sequence
  Synthetic oligonucleotide
  hsa-miR-4653-5p MIMAT0019718
ucucugagcaaggcuuaacacc

SEQ ID NO: 2493 - RNA, 22 nt, Artificial Sequence
  Synthetic oligonucleotide
  hsa-miR-516b-5p MIMAT0002859
aucuggagguaagaagcacuuu

SEQ ID NO: 2494 - RNA, 23 nt, Artificial Sequence
  Synthetic oligonucleotide
  hsa-miR-302c-3p MIMAT0000717
uaagugcuuccauguuucagugg

SEQ ID NO: 2495 - RNA, 21 nt, Artificial Sequence
  Synthetic oligonucleotide
  hsa-miR-671-3p MIMAT0004819
uccgguucucagggcuccacc

SEQ ID NO: 2496 - RNA, 19 nt, Artificial Sequence
  Synthetic oligonucleotide
  hsa-miR-1261 MIMAT0005913
auggauaaggcuuuggcuu

SEQ ID NO: 2497 - RNA, 22 nt, Artificial Sequence
  Synthetic oligonucleotide
  hsa-miR-545-3p MIMAT0003165
ucagcaaacauuuauugugugc

SEQ ID NO: 2498 - RNA, 22 nt, Artificial Sequence
  Synthetic oligonucleotide
  hsa-miR-184 MIMAT0000454
uggacggagaacugauaagggu

SEQ ID NO: 2499 - RNA, 27 nt, Artificial Sequence
  Synthetic oligonucleotide
  hsa-miR-7107-3p MIMAT0028112
uggucuguucauucucucuuuuuggcc

SEQ ID NO: 2500 - RNA, 21 nt, Artificial Sequence
  Synthetic oligonucleotide
  hsa-miR-7151-3p MIMAT0028213
cuacaggcuggaaugggcuca

SEQ ID NO: 2501 - RNA, 22 nt, Artificial Sequence
  Synthetic oligonucleotide
  hsa-miR-93-3p MIMAT0004509
acugcugagcuagcacuucccg

SEQ ID NO: 2502 - RNA, 23 nt, Artificial Sequence
  Synthetic oligonucleotide
  hsa-miR-128-2-5p MIMAT0031095
gggggccgauacacuguacgaga

SEQ ID NO: 2503 - RNA, 23 nt, Artificial Sequence
  Synthetic oligonucleotide
  hsa-miR-135b-5p MIMAT0000758
uauggcuuuucauuccuauguga

SEQ ID NO: 2504 - RNA, 21 nt, Artificial Sequence
  Synthetic oligonucleotide
  hsa-miR-548j-3p MIMAT0026737
caaaaacugcauuacuuuugc

SEQ ID NO: 2505 - RNA, 21 nt, Artificial Sequence
  Synthetic oligonucleotide
  hsa-miR-195-5p MIMAT0000461
uagcagcacagaaauauuggc

SEQ ID NO: 2506 - RNA, 22 nt, Artificial Sequence
  Synthetic oligonucleotide
  hsa-miR-651-3p MIMAT0026624
aaaggaaaguguauccuaaaag

SEQ ID NO: 2507 - RNA, 22 nt, Artificial Sequence
  Synthetic oligonucleotide
  hsa-miR-125a-3p MIMAT0004602
acaggugagguucuugggagcc

SEQ ID NO: 2508 - RNA, 23 nt, Artificial Sequence
  Synthetic oligonucleotide
  hsa-miR-328-5p MIMAT0026486
gggggggcaggaggggcucaggg

SEQ ID NO: 2509 - RNA, 21 nt, Artificial Sequence
  Synthetic oligonucleotide
  hsa-miR-8057 MIMAT0030984
guggcucuguaguaagaugga

SEQ ID NO: 2510 - RNA, 23 nt, Artificial Sequence
  Synthetic oligonucleotide
  hsa-miR-6798-5p MIMAT0027496
ccagggggaugggcgagcuuggg

SEQ ID NO: 2511 - RNA, 22 nt, Artificial Sequence
  Synthetic oligonucleotide
  hsa-let-7a-2-3p MIMAT0010195
cuguacagccuccuagcuuucc

SEQ ID NO: 2512 - RNA, 17 nt, Artificial Sequence
  Synthetic oligonucleotide
  hsa-miR-4258 MIMAT0016879
ccccgccaccgccuugg

SEQ ID NO: 2513 - RNA, 21 nt, Artificial Sequence
  Synthetic oligonucleotide
  hsa-miR-6819-3p MIMAT0027539
aagccucuguccccaccccag

SEQ ID NO: 2514 - RNA, 23 nt, Artificial Sequence
  Synthetic oligonucleotide
  hsa-miR-224-3p MIMAT0009198
aaaauggugcccuagugacuaca

SEQ ID NO: 2515 - RNA, 22 nt, Artificial Sequence
  Synthetic oligonucleotide
  hsa-miR-520d-3p MIMAT0002856
aaagugcuucucuuuggugggu

SEQ ID NO: 2516 - RNA, 22 nt, Artificial Sequence
  Synthetic oligonucleotide
  hsa-miR-6752-5p MIMAT0027404
gggggguguggagccagggggc

SEQ ID NO: 2517 - RNA, 17 nt, Artificial Sequence
  Synthetic oligonucleotide
  hsa-miR-4447 MIMAT0018966
ggugggggcuguuguuu

SEQ ID NO: 2518 - RNA, 22 nt, Artificial Sequence
  Synthetic oligonucleotide
  hsa-miR-450b-5p MIMAT0004909
uuuugcaauauguuccugaaua

SEQ ID NO: 2519 - RNA, 17 nt, Artificial Sequence
  Synthetic oligonucleotide
  hsa-miR-3182 MIMAT0015062
gcuucuguaguguaguc

SEQ ID NO: 2520 - RNA, 22 nt, Artificial Sequence
  Synthetic oligonucleotide
  hsa-miR-4704-5p MIMAT0019803
gacacuaggcaugugagugauu

SEQ ID NO: 2521 - RNA, 24 nt, Artificial Sequence
  Synthetic oligonucleotide
  hsa-miR-6894-5p MIMAT0027688
aggaggauggagagcugggccaga

SEQ ID NO: 2522 - RNA, 24 nt, Artificial Sequence
  Synthetic oligonucleotide
  hsa-miR-6747-5p MIMAT0027394
agggguguggaaagaggcagaaca

SEQ ID NO: 2523 - RNA, 19 nt, Artificial Sequence
  Synthetic oligonucleotide
  hsa-miR-4271 MIMAT0016901
gggggaagaaaaggugggg

SEQ ID NO: 2524 - RNA, 18 nt, Artificial Sequence
  Synthetic oligonucleotide
  hsa-miR-4792 MIMAT0019964
cggugagcgcucgcuggc

SEQ ID NO: 2525 - RNA, 23 nt, Artificial Sequence
  Synthetic oligonucleotide
  hsa-miR-4683 MIMAT0019768
uggagauccagugcucgcccgau

SEQ ID NO: 2526 - RNA, 22 nt, Artificial Sequence
  Synthetic oligonucleotide
  hsa-miR-4790-3p MIMAT0019962
ugaaugguaaagcgaugucaca

SEQ ID NO: 2527 - RNA, 21 nt, Artificial Sequence
  Synthetic oligonucleotide
  hsa-miR-6737-5p MIMAT0027375
uugggguggucggcccuggag

SEQ ID NO: 2528 - RNA, 19 nt, Artificial Sequence
  Synthetic oligonucleotide
  hsa-miR-6082 MIMAT0023707
gaauacgucugguugaucc

SEQ ID NO: 2529 - RNA, 23 nt, Artificial Sequence
  Synthetic oligonucleotide
  hsa-miR-4691-3p MIMAT0019782
ccagccacggacugagagugcau

SEQ ID NO: 2530 - RNA, 21 nt, Artificial Sequence
  Synthetic oligonucleotide
  hsa-miR-1228-5p MIMAT0005582
gugggcgggggcaggugugug

SEQ ID NO: 2531 - RNA, 19 nt, Artificial Sequence
  Synthetic oligonucleotide
  hsa-miR-3654 MIMAT0018074
gacuggacaagcugaggaa

SEQ ID NO: 2532 - RNA, 21 nt, Artificial Sequence
  Synthetic oligonucleotide
  hsa-miR-7114-3p MIMAT0028126
ugacccaccccucuccaccag

SEQ ID NO: 2533 - RNA, 22 nt, Artificial Sequence
  Synthetic oligonucleotide
  hsa-miR-299-3p MIMAT0000687
uaugugggaugguaaaccgcuu

SEQ ID NO: 2534 - RNA, 23 nt, Artificial Sequence
  Synthetic oligonucleotide
  hsa-miR-636 MIMAT0003306
ugugcuugcucgucccgcccgca

SEQ ID NO: 2535 - RNA, 23 nt, Artificial Sequence
  Synthetic oligonucleotide
  hsa-miR-4254 MIMAT0016884
gccuggagcuacuccaccaucuc

SEQ ID NO: 2536 - RNA, 21 nt, Artificial Sequence
  Synthetic oligonucleotide
  hsa-miR-578 MIMAT0003243
cuucuugugcucuaggauugu

SEQ ID NO: 2537 - RNA, 22 nt, Artificial Sequence
  Synthetic oligonucleotide
  hsa-miR-3150b-5p MIMAT0019226
caaccucgaggaucuccccagc

SEQ ID NO: 2538 - RNA, 21 nt, Artificial Sequence
  Synthetic oligonucleotide
  hsa-miR-6834-5p MIMAT0027568
gugagggacugggauuugugg

SEQ ID NO: 2539 - RNA, 23 nt, Artificial Sequence
  Synthetic oligonucleotide
  hsa-miR-3174 MIMAT0015051
uagugaguuagagaugcagagcc

SEQ ID NO: 2540 - RNA, 22 nt, Artificial Sequence
  Synthetic oligonucleotide
  hsa-miR-6739-5p MIMAT0027379
ugggaaagagaaagaacaagua

SEQ ID NO: 2541 - RNA, 21 nt, Artificial Sequence
  Synthetic oligonucleotide
  hsa-miR-1206 MIMAT0005870
uguucauguagauguuuaagc

SEQ ID NO: 2542 - RNA, 22 nt, Artificial Sequence
  Synthetic oligonucleotide
  hsa-miR-934 MIMAT0004977
ugucuacuacuggagacacugg

SEQ ID NO: 2543 - RNA, 21 nt, Artificial Sequence
  Synthetic oligonucleotide
  hsa-miR-6823-5p MIMAT0027546
ucaggguugguagggguugcu

SEQ ID NO: 2544 - RNA, 22 nt, Artificial Sequence
  Synthetic oligonucleotide
  hsa-miR-548am-3p MIMAT0019076
caaaaacugcaguuacuuuugu

SEQ ID NO: 2545 - RNA, 22 nt, Artificial Sequence
  Synthetic oligonucleotide
  hsa-miR-3939 MIMAT0018355
uacgcgcagaccacaggauguc

SEQ ID NO: 2546 - RNA, 22 nt, Artificial Sequence
  Synthetic oligonucleotide
  hsa-miR-424-5p MIMAT0001341
cagcagcaauucauguuuugaa

SEQ ID NO: 2547 - RNA, 22 nt, Artificial Sequence
  Synthetic oligonucleotide
  hsa-miR-6868-5p MIMAT0027636
acuggcagaacacugaagcagc

SEQ ID NO: 2548 - RNA, 21 nt, Artificial Sequence
  Synthetic oligonucleotide
  hsa-miR-6502-3p MIMAT0025461
uagaccaucuuucuagaguau

SEQ ID NO: 2549 - RNA, 22 nt, Artificial Sequence
  Synthetic oligonucleotide
  hsa-miR-194-5p MIMAT0000460
uguaacagcaacuccaugugga

SEQ ID NO: 2550 - RNA, 22 nt, Artificial Sequence
  Synthetic oligonucleotide
  hsa-miR-3667-3p MIMAT0018090
accuuccucuccaugggucuuu

SEQ ID NO: 2551 - RNA, 19 nt, Artificial Sequence
  Synthetic oligonucleotide
  hsa-miR-1322 MIMAT0005953
gaugaugcugcugaugcug

SEQ ID NO: 2552 - RNA, 22 nt, Artificial Sequence
  Synthetic oligonucleotide
  hsa-miR-6842-3p MIMAT0027587
uuggcuggucucugcuccgcag

SEQ ID NO: 2553 - RNA, 21 nt, Artificial Sequence
  Synthetic oligonucleotide
  hsa-miR-5189-3p MIMAT0027088
ugccaaccgucagagcccaga

SEQ ID NO: 2554 - RNA, 23 nt, Artificial Sequence
  Synthetic oligonucleotide
  hsa-miR-4742-3p MIMAT0019873
ucuguauucuccuuugccugcag

SEQ ID NO: 2555 - RNA, 21 nt, Artificial Sequence
  Synthetic oligonucleotide
  hsa-miR-4495 MIMAT0019030
aauguaaacaggcuuuuugcu

SEQ ID NO: 2556 - RNA, 22 nt, Artificial Sequence
  Synthetic oligonucleotide
  hsa-miR-548bb-5p MIMAT0035703
aaaaguaacuaugguuuuugcc

SEQ ID NO: 2557 - RNA, 26 nt, Artificial Sequence
  Synthetic oligonucleotide
  hsa-miR-4518 MIMAT0019055
gcucagggaugauaacugugcugaga

SEQ ID NO: 2558 - RNA, 20 nt, Artificial Sequence
  Synthetic oligonucleotide
  hsa-miR-609 MIMAT0003277
aggguguuucucucaucucu

SEQ ID NO: 2559 - RNA, 20 nt, Artificial Sequence
  Synthetic oligonucleotide
  hsa-miR-548aw MIMAT0022471
gugcaaaagucaucacgguu

SEQ ID NO: 2560 - RNA, 24 nt, Artificial Sequence
  Synthetic oligonucleotide
  hsa-miR-3609 MIMAT0017986
caaagugaugaguaauacuggcug

SEQ ID NO: 2561 - RNA, 23 nt, Artificial Sequence
  Synthetic oligonucleotide
  hsa-miR-3944-3p MIMAT0018360
uucgggcuggccugcugcuccgg

SEQ ID NO: 2562 - RNA, 21 nt, Artificial Sequence
  Synthetic oligonucleotide
  hsa-miR-7110-5p MIMAT0028117
uggggguguggggagagagag

SEQ ID NO: 2563 - RNA, 18 nt, Artificial Sequence
  Synthetic oligonucleotide
  hsa-miR-7975 MIMAT0031178
auccuagucacggcacca

SEQ ID NO: 2564 - RNA, 22 nt, Artificial Sequence
  Synthetic oligonucleotide
  hsa-miR-548a-3p MIMAT0003251
caaaacuggcaauuacuuuugc

SEQ ID NO: 2565 - RNA, 18 nt, Artificial Sequence
  Synthetic oligonucleotide
  hsa-miR-6126 MIMAT0024599
gugaaggcccggcggaga

SEQ ID NO: 2566 - RNA, 22 nt, Artificial Sequence
  Synthetic oligonucleotide
  hsa-miR-4440 MIMAT0018958
ugucguggggcuugcuggcuug

SEQ ID NO: 2567 - RNA, 23 nt, Artificial Sequence
  Synthetic oligonucleotide
  hsa-miR-1255a MIMAT0005906
aggaugagcaaagaaaguagauu

SEQ ID NO: 2568 - RNA, 21 nt, Artificial Sequence
  Synthetic oligonucleotide
  hsa-miR-378h MIMAT0018984
acuggacuuggugucagaugg

SEQ ID NO: 2569 - RNA, 19 nt, Artificial Sequence
  Synthetic oligonucleotide
  hsa-miR-7976 MIMAT0031179
ugcccugagacuuuugcuc

SEQ ID NO: 2570 - RNA, 22 nt, Artificial Sequence
  Synthetic oligonucleotide
  hsa-miR-1468-3p MIMAT0026638
agcaaaauaagcaaauggaaaa

SEQ ID NO: 2571 - RNA, 22 nt, Artificial Sequence
  Synthetic oligonucleotide
  hsa-miR-4719 MIMAT0019832
ucacaaaucuauaauaugcagg

SEQ ID NO: 2572 - RNA, 21 nt, Artificial Sequence
  Synthetic oligonucleotide
  hsa-miR-4727-5p MIMAT0019847
aucugccagcuuccacagugg

SEQ ID NO: 2573 - RNA, 20 nt, Artificial Sequence
  Synthetic oligonucleotide
  hsa-miR-620 MIMAT0003289
auggagauagauauagaaau

SEQ ID NO: 2574 - RNA, 22 nt, Artificial Sequence
  Synthetic oligonucleotide
  hsa-miR-451b MIMAT0019840
uagcaagagaaccauuaccauu

SEQ ID NO: 2575 - RNA, 20 nt, Artificial Sequence
  Synthetic oligonucleotide
  hsa-miR-6832-3p MIMAT0027565
acccuuuuucucuuucccag

SEQ ID NO: 2576 - RNA, 23 nt, Artificial Sequence
  Synthetic oligonucleotide
  hsa-miR-4660 MIMAT0019728
ugcagcucugguggaaaauggag

SEQ ID NO: 2577 - RNA, 22 nt, Artificial Sequence
  Synthetic oligonucleotide
  hsa-miR-619-5p MIMAT0026622
gcugggauuacaggcaugagcc

SEQ ID NO: 2578 - RNA, 20 nt, Artificial Sequence
  Synthetic oligonucleotide
  hsa-miR-6838-3p MIMAT0027579
aaguccugcuucuguugcag

SEQ ID NO: 2579 - RNA, 19 nt, Artificial Sequence
  Synthetic oligonucleotide
  hsa-miR-6127 MIMAT0024610
ugagggagugggugggagg

SEQ ID NO: 2580 - RNA, 22 nt, Artificial Sequence
  Synthetic oligonucleotide
  hsa-miR-597-5p MIMAT0003265
ugugucacucgaugaccacugu

SEQ ID NO: 2581 - RNA, 22 nt, Artificial Sequence
  Synthetic oligonucleotide
  hsa-miR-550a-3p MIMAT0003257
ugucuuacucccucaggcacau

SEQ ID NO: 2582 - RNA, 22 nt, Artificial Sequence
  Synthetic oligonucleotide
  hsa-miR-3144-3p MIMAT0015015
auauaccuguucggucucuuua

SEQ ID NO: 2583 - RNA, 22 nt, Artificial Sequence
  Synthetic oligonucleotide
  hsa-let-7e-5p MIMAT0000066
ugagguaggagguuguauaguu

SEQ ID NO: 2584 - RNA, 22 nt, Artificial Sequence
  Synthetic oligonucleotide
  hsa-miR-3127-3p MIMAT0019201
uccccuucugcaggccugcugg

SEQ ID NO: 2585 - RNA, 22 nt, Artificial Sequence
  Synthetic oligonucleotide
  hsa-miR-4510 MIMAT0019047
ugagggaguaggauguaugguu

SEQ ID NO: 2586 - RNA, 20 nt, Artificial Sequence
  Synthetic oligonucleotide
  hsa-miR-4301 MIMAT0016850
ucccacuacuucacuuguga

SEQ ID NO: 2587 - RNA, 21 nt, Artificial Sequence
  Synthetic oligonucleotide
  hsa-miR-4708-5p MIMAT0019809
agagaugccgccuugcuccuu

SEQ ID NO: 2588 - RNA, 21 nt, Artificial Sequence
  Synthetic oligonucleotide
  hsa-miR-8088 MIMAT0031015
ccucgguacuggaaaggggua

SEQ ID NO: 2589 - RNA, 17 nt, Artificial Sequence
  Synthetic oligonucleotide
  hsa-miR-1227-5p MIMAT0022941
guggggccaggcggugg

SEQ ID NO: 2590 - RNA, 24 nt, Artificial Sequence
  Synthetic oligonucleotide
  hsa-miR-5189-5p MIMAT0021120
ucugggcacaggcggauggacagg

SEQ ID NO: 2591 - RNA, 22 nt, Artificial Sequence
  Synthetic oligonucleotide
  hsa-let-7f-1-3p MIMAT0004486
cuauacaaucuauugccuuccc

SEQ ID NO: 2592 - RNA, 22 nt, Artificial Sequence
  Synthetic oligonucleotide
  hsa-miR-8063 MIMAT0030990
ucaaaaucaggagucggggcuu

SEQ ID NO: 2593 - RNA, 20 nt, Artificial Sequence
  Synthetic oligonucleotide
  hsa-miR-760 MIMAT0004957
cggcucugggucugugggga

SEQ ID NO: 2594 - RNA, 21 nt, Artificial Sequence
  Synthetic oligonucleotide
  hsa-miR-583 MIMAT0003248
caaagaggaaggucccauuac

SEQ ID NO: 2595 - RNA, 22 nt, Artificial Sequence
  Synthetic oligonucleotide
  hsa-let-7c-3p MIMAT0026472
cuguacaaccuucuagcuuucc

SEQ ID NO: 2596 - RNA, 23 nt, Artificial Sequence
  Synthetic oligonucleotide
  hsa-miR-611 MIMAT0003279
gcgaggaccccucggggucugac

SEQ ID NO: 2597 - RNA, 23 nt, Artificial Sequence
  Synthetic oligonucleotide
  hsa-miR-203b-3p MIMAT0019814
uugaacuguuaagaaccacugga

SEQ ID NO: 2598 - RNA, 22 nt, Artificial Sequence
  Synthetic oligonucleotide
  hsa-miR-1296-3p MIMAT0026637
gaguggggcuucgacccuaacc

SEQ ID NO: 2599 - RNA, 23 nt, Artificial Sequence
  Synthetic oligonucleotide
  hsa-miR-4724-5p MIMAT0019841
aacugaaccaggagugagcuucg

SEQ ID NO: 2600 - RNA, 23 nt, Artificial Sequence
  Synthetic oligonucleotide
  hsa-miR-4703-5p MIMAT0019801
uagcaauacaguacaaauauagu

SEQ ID NO: 2601 - RNA, 26 nt, Artificial Sequence
  Synthetic oligonucleotide
  hsa-miR-4700-3p MIMAT0019797
cacaggacugacuccucaccccagug

SEQ ID NO: 2602 - RNA, 19 nt, Artificial Sequence
  Synthetic oligonucleotide
  hsa-miR-4287 MIMAT0016917
ucucccuugagggcacuuu

SEQ ID NO: 2603 - RNA, 21 nt, Artificial Sequence
  Synthetic oligonucleotide
  hsa-miR-6843-3p MIMAT0027588
auggucuccuguucucugcag

SEQ ID NO: 2604 - RNA, 23 nt, Artificial Sequence
  Synthetic oligonucleotide
  hsa-miR-3929 MIMAT0018206
gaggcugaugugaguagaccacu

SEQ ID NO: 2605 - RNA, 21 nt, Artificial Sequence
  Synthetic oligonucleotide
  hsa-miR-631 MIMAT0003300
agaccuggcccagaccucagc

SEQ ID NO: 2606 - RNA, 21 nt, Artificial Sequence
  Synthetic oligonucleotide
  hsa-miR-7846-3p MIMAT0030421
cagcggagccuggagagaagg

SEQ ID NO: 2607 - RNA, 23 nt, Artificial Sequence
  Synthetic oligonucleotide
  hsa-miR-3921 MIMAT0018196
ucucugaguaccauaugccuugu

SEQ ID NO: 2608 - RNA, 22 nt, Artificial Sequence
  Synthetic oligonucleotide
  hsa-miR-6737-3p MIMAT0027376
ucugugcuucaccccuacccag

SEQ ID NO: 2609 - RNA, 22 nt, Artificial Sequence
  Synthetic oligonucleotide
  hsa-miR-125b-1-3p MIMAT0004592
acggguuaggcucuugggagcu

SEQ ID NO: 2610 - RNA, 22 nt, Artificial Sequence
  Synthetic oligonucleotide
  hsa-miR-4774-5p MIMAT0019929
ucugguauguaguagguaauaa

SEQ ID NO: 2611 - RNA, 22 nt, Artificial Sequence
  Synthetic oligonucleotide
  hsa-miR-4435 MIMAT0018951
auggccagagcucacacagagg

SEQ ID NO: 2612 - RNA, 21 nt, Artificial Sequence
  Synthetic oligonucleotide
  hsa-miR-6798-3p MIMAT0027497
cuaccccccaucccccuguag

SEQ ID NO: 2613 - RNA, 16 nt, Artificial Sequence
  Synthetic oligonucleotide
  hsa-miR-4266 MIMAT0016892
cuaggaggccuuggcc

SEQ ID NO: 2614 - RNA, 21 nt, Artificial Sequence
  Synthetic oligonucleotide
  hsa-miR-1910-5p MIMAT0007884
ccaguccugugccugccgccu

SEQ ID NO: 2615 - RNA, 22 nt, Artificial Sequence
  Synthetic oligonucleotide
  hsa-miR-4769-3p MIMAT0019923
ucugccauccucccuccccuac

SEQ ID NO: 2616 - RNA, 22 nt, Artificial Sequence
  Synthetic oligonucleotide
  hsa-miR-548ab MIMAT0018928
aaaaguaauuguggauuuugcu

SEQ ID NO: 2617 - RNA, 22 nt, Artificial Sequence
  Synthetic oligonucleotide
  hsa-miR-181a-3p MIMAT0000270
accaucgaccguugauuguacc

SEQ ID NO: 2618 - RNA, 24 nt, Artificial Sequence
  Synthetic oligonucleotide
  hsa-miR-664a-5p MIMAT0005948
acuggcuagggaaaaugauuggau

SEQ ID NO: 2619 - RNA, 23 nt, Artificial Sequence
  Synthetic oligonucleotide
  hsa-miR-466 MIMAT0015002
auacacauacacgcaacacacau

SEQ ID NO: 2620 - RNA, 16 nt, Artificial Sequence
  Synthetic oligonucleotide
  hsa-miR-4279 MIMAT0016909
cucuccucccggcuuc

SEQ ID NO: 2621 - RNA, 23 nt, Artificial Sequence
  Synthetic oligonucleotide
  hsa-miR-219b-3p MIMAT0019748
agaauugcguuuggacaaucagu

SEQ ID NO: 2622 - RNA, 22 nt, Artificial Sequence
  Synthetic oligonucleotide
  hsa-miR-4425 MIMAT0018940
uguugggauucagcaggaccau

SEQ ID NO: 2623 - RNA, 22 nt, Artificial Sequence
  Synthetic oligonucleotide
  hsa-miR-16-2-3p MIMAT0004518
ccaauauuacugugcugcuuua

SEQ ID NO: 2624 - RNA, 22 nt, Artificial Sequence
  Synthetic oligonucleotide
  hsa-miR-320a MIMAT0000510
aaaagcuggguugagagggcga

SEQ ID NO: 2625 - RNA, 22 nt, Artificial Sequence
  Synthetic oligonucleotide
  hsa-miR-7843-3p MIMAT0030412
augaagccuucucugccuuacg

SEQ ID NO: 2626 - RNA, 22 nt, Artificial Sequence
  Synthetic oligonucleotide
  hsa-miR-1225-5p MIMAT0005572
guggguacggcccagugggggg

SEQ ID NO: 2627 - RNA, 17 nt, Artificial Sequence
  Synthetic oligonucleotide
  hsa-miR-4288 MIMAT0016918
uugucugcugaguuucc

SEQ ID NO: 2628 - RNA, 23 nt, Artificial Sequence
  Synthetic oligonucleotide
  hsa-miR-181a-5p MIMAT0000256
aacauucaacgcugucggugagu

SEQ ID NO: 2629 - RNA, 22 nt, Artificial Sequence
  Synthetic oligonucleotide
  hsa-miR-4662a-3p MIMAT0019732
aaagauagacaauuggcuaaau

SEQ ID NO: 2630 - RNA, 21 nt, Artificial Sequence
  Synthetic oligonucleotide
  hsa-miR-4766-3p MIMAT0019918
auagcaauugcucuuuuggaa

SEQ ID NO: 2631 - RNA, 22 nt, Artificial Sequence
  Synthetic oligonucleotide
  hsa-miR-1245b-3p MIMAT0019951
ucagaugaucuaaaggccuaua

SEQ ID NO: 2632 - RNA, 21 nt, Artificial Sequence
  Synthetic oligonucleotide
  hsa-miR-6749-3p MIMAT0027399
cuccuccccugccuggcccag

SEQ ID NO: 2633 - RNA, 18 nt, Artificial Sequence
  Synthetic oligonucleotide
  hsa-miR-1827 MIMAT0006767
ugaggcaguagauugaau

SEQ ID NO: 2634 - RNA, 22 nt, Artificial Sequence
  Synthetic oligonucleotide
  hsa-miR-5695 MIMAT0022488
acuccaagaagaaucuagacag

SEQ ID NO: 2635 - RNA, 22 nt, Artificial Sequence
  Synthetic oligonucleotide
  hsa-miR-1299 MIMAT0005887
uucuggaauucugugugaggga

SEQ ID NO: 2636 - RNA, 22 nt, Artificial Sequence
  Synthetic oligonucleotide
  hsa-miR-374c-3p MIMAT0022735
cacuuagcagguuguauuauau

SEQ ID NO: 2637 - RNA, 20 nt, Artificial Sequence
  Synthetic oligonucleotide
  hsa-miR-4701-3p MIMAT0019799
augggugauggguguggugu

SEQ ID NO: 2638 - RNA, 19 nt, Artificial Sequence
  Synthetic oligonucleotide
  hsa-miR-7162-3p MIMAT0028235
ucugagguggaacagcagc

SEQ ID NO: 2639 - RNA, 19 nt, Artificial Sequence
  Synthetic oligonucleotide
  hsa-miR-6131 MIMAT0024615
ggcuggucagaugggagug

SEQ ID NO: 2640 - RNA, 21 nt, Artificial Sequence
  Synthetic oligonucleotide
  hsa-miR-6845-3p MIMAT0027591
ccucuccucccugugccccag

SEQ ID NO: 2641 - RNA, 22 nt, Artificial Sequence
  Synthetic oligonucleotide
  hsa-miR-320b MIMAT0005792
aaaagcuggguugagagggcaa

SEQ ID NO: 2642 - RNA, 22 nt, Artificial Sequence
  Synthetic oligonucleotide
  hsa-miR-505-5p MIMAT0004776
gggagccaggaaguauugaugu

SEQ ID NO: 2643 - RNA, 22 nt, Artificial Sequence
  Synthetic oligonucleotide
  hsa-miR-4729 MIMAT0019851
ucauuuaucuguugggaagcua

SEQ ID NO: 2644 - RNA, 21 nt, Artificial Sequence
  Synthetic oligonucleotide
  hsa-miR-6781-5p MIMAT0027462
cgggccggaggucaagggcgu

SEQ ID NO: 2645 - RNA, 20 nt, Artificial Sequence
  Synthetic oligonucleotide
  hsa-miR-6822-5p MIMAT0027544
cagggaaccaguuggggcuu

SEQ ID NO: 2646 - RNA, 21 nt, Artificial Sequence
  Synthetic oligonucleotide
  hsa-miR-192-5p MIMAT0000222
cugaccuaugaauugacagcc

SEQ ID NO: 2647 - RNA, 22 nt, Artificial Sequence
  Synthetic oligonucleotide
  hsa-miR-3664-5p MIMAT0018086
aacucugucuucacucaugagu

SEQ ID NO: 2648 - RNA, 22 nt, Artificial Sequence
  Synthetic oligonucleotide
  hsa-miR-548l MIMAT0005889
aaaaguauuugcggguuuuguc

SEQ ID NO: 2649 - RNA, 23 nt, Artificial Sequence
  Synthetic oligonucleotide
  hsa-miR-6830-3p MIMAT0027561
ugucuuucuucucucccuugcag

SEQ ID NO: 2650 - RNA, 22 nt, Artificial Sequence
  Synthetic oligonucleotide
  hsa-miR-1283 MIMAT0005799
ucuacaaaggaaagcgcuuucu

SEQ ID NO: 2651 - RNA, 21 nt, Artificial Sequence
  Synthetic oligonucleotide
  hsa-miR-6729-3p MIMAT0027360
ucaucccccucgcccucucag

SEQ ID NO: 2652 - RNA, 21 nt, Artificial Sequence
  Synthetic oligonucleotide
  hsa-miR-5006-3p MIMAT0021034
uuucccuuuccauccuggcag

SEQ ID NO: 2653 - RNA, 22 nt, Artificial Sequence
  Synthetic oligonucleotide
  hsa-miR-5689 MIMAT0022481
agcauacaccuguaguccuaga

SEQ ID NO: 2654 - RNA, 22 nt, Artificial Sequence
  Synthetic oligonucleotide
  hsa-miR-130b-3p MIMAT0000691
cagugcaaugaugaaagggcau

SEQ ID NO: 2655 - RNA, 23 nt, Artificial Sequence
  Synthetic oligonucleotide
  hsa-miR-412-3p MIMAT0002170
acuucaccugguccacuagccgu

SEQ ID NO: 2656 - RNA, 23 nt, Artificial Sequence
  Synthetic oligonucleotide
  hsa-miR-548z MIMAT0018446
caaaaaccgcaauuacuuuugca

SEQ ID NO: 2657 - RNA, 22 nt, Artificial Sequence
  Synthetic oligonucleotide
  hsa-let-7c-5p MIMAT0000064
ugagguaguagguuguaugguu

SEQ ID NO: 2658 - RNA, 22 nt, Artificial Sequence
  Synthetic oligonucleotide
  hsa-miR-203a-3p MIMAT0000264
gugaaauguuuaggaccacuag

SEQ ID NO: 2659 - RNA, 22 nt, Artificial Sequence
  Synthetic oligonucleotide
  hsa-miR-377-3p MIMAT0000730
aucacacaaaggcaacuuuugu

SEQ ID NO: 2660 - RNA, 22 nt, Artificial Sequence
  Synthetic oligonucleotide
  hsa-miR-6783-3p MIMAT0027467
uuccugggcuucuccucuguag

SEQ ID NO: 2661 - RNA, 17 nt, Artificial Sequence
  Synthetic oligonucleotide
  hsa-miR-4319 MIMAT0016870
ucccugagcaaagccac

SEQ ID NO: 2662 - RNA, 22 nt, Artificial Sequence
  Synthetic oligonucleotide
  hsa-miR-6841-5p MIMAT0027584
uaggguacucagagcaaguugu

SEQ ID NO: 2663 - RNA, 22 nt, Artificial Sequence
  Synthetic oligonucleotide
  hsa-miR-374c-5p MIMAT0018443
auaauacaaccugcuaagugcu

SEQ ID NO: 2664 - RNA, 22 nt, Artificial Sequence
  Synthetic oligonucleotide
  hsa-miR-199b-3p MIMAT0004563
acaguagucugcacauugguua

SEQ ID NO: 2665 - RNA, 19 nt, Artificial Sequence
  Synthetic oligonucleotide
  hsa-miR-6165 MIMAT0024782
cagcaggaggugaggggag

SEQ ID NO: 2666 - RNA, 23 nt, Artificial Sequence
  Synthetic oligonucleotide
  hsa-miR-454-3p MIMAT0003885
uagugcaauauugcuuauagggu

SEQ ID NO: 2667 - RNA, 20 nt, Artificial Sequence
  Synthetic oligonucleotide
  hsa-miR-4639-3p MIMAT0019698
ucacucucaccuugcuuugc

SEQ ID NO: 2668 - RNA, 22 nt, Artificial Sequence
  Synthetic oligonucleotide
  hsa-miR-1278 MIMAT0005936
uaguacugugcauaucaucuau

SEQ ID NO: 2669 - RNA, 23 nt, Artificial Sequence
  Synthetic oligonucleotide
  hsa-miR-6865-5p MIMAT0027630
uagguggcagaggagggacuuca

SEQ ID NO: 2670 - RNA, 22 nt, Artificial Sequence
  Synthetic oligonucleotide
  hsa-miR-5699-3p MIMAT0022492
uccugucuuuccuuguuggagc

SEQ ID NO: 2671 - RNA, 22 nt, Artificial Sequence
  Synthetic oligonucleotide
  hsa-miR-6746-3p MIMAT0027393
cagccgccgccugucuccacag

SEQ ID NO: 2672 - RNA, 22 nt, Artificial Sequence
  Synthetic oligonucleotide
  hsa-miR-6720-3p MIMAT0025851
cgcgccugcaggaacugguaga

SEQ ID NO: 2673 - RNA, 23 nt, Artificial Sequence
  Synthetic oligonucleotide
  hsa-miR-874-5p MIMAT0026718
cggccccacgcaccaggguaaga

SEQ ID NO: 2674 - RNA, 21 nt, Artificial Sequence
  Synthetic oligonucleotide
  hsa-miR-6505-3p MIMAT0025467
ugacuucuaccucuuccaaag

SEQ ID NO: 2675 - RNA, 23 nt, Artificial Sequence
  Synthetic oligonucleotide
  hsa-miR-6849-5p MIMAT0027598
gaguggauaggggagugugugga

SEQ ID NO: 2676 - RNA, 19 nt, Artificial Sequence
  Synthetic oligonucleotide
  hsa-miR-1973 MIMAT0009448
accgugcaaagguagcaua

SEQ ID NO: 2677 - RNA, 22 nt, Artificial Sequence
  Synthetic oligonucleotide
  hsa-miR-4473 MIMAT0019000
cuagugcucuccguuacaagua

SEQ ID NO: 2678 - RNA, 21 nt, Artificial Sequence
  Synthetic oligonucleotide
  hsa-miR-6786-5p MIMAT0027472
gcgguggggccggaggggcgu

SEQ ID NO: 2679 - RNA, 22 nt, Artificial Sequence
  Synthetic oligonucleotide
  hsa-miR-888-3p MIMAT0004917
gacugacaccucuuugggugaa

SEQ ID NO: 2680 - RNA, 22 nt, Artificial Sequence
  Synthetic oligonucleotide
  hsa-miR-3129-3p MIMAT0019202
aaacuaaucucuacacugcugc

SEQ ID NO: 2681 - RNA, 23 nt, Artificial Sequence
  Synthetic oligonucleotide
  hsa-miR-6866-5p MIMAT0027632
uuagaggcuggaauagagauucu

SEQ ID NO: 2682 - RNA, 20 nt, Artificial Sequence
  Synthetic oligonucleotide
  hsa-miR-6888-5p MIMAT0027676
aaggagaugcucaggcagau

SEQ ID NO: 2683 - RNA, 23 nt, Artificial Sequence
  Synthetic oligonucleotide
  hsa-miR-107 MIMAT0000104
agcagcauuguacagggcuauca

SEQ ID NO: 2684 - RNA, 23 nt, Artificial Sequence
  Synthetic oligonucleotide
  hsa-miR-5003-5p MIMAT0021025
ucacaacaaccuugcaggguaga

SEQ ID NO: 2685 - RNA, 21 nt, Artificial Sequence
  Synthetic oligonucleotide
  hsa-miR-4804-5p MIMAT0019984
uuggacgguaagguuaagcaa

SEQ ID NO: 2686 - RNA, 22 nt, Artificial Sequence
  Synthetic oligonucleotide
  hsa-miR-300 MIMAT0004903
uauacaagggcagacucucucu

SEQ ID NO: 2687 - RNA, 21 nt, Artificial Sequence
  Synthetic oligonucleotide
  hsa-miR-6507-5p MIMAT0025470
gaagaauaggagggacuuugu

SEQ ID NO: 2688 - RNA, 20 nt, Artificial Sequence
  Synthetic oligonucleotide
  hsa-miR-3678-5p MIMAT0018102
uccguacaaacucugcugug

SEQ ID NO: 2689 - RNA, 23 nt, Artificial Sequence
  Synthetic oligonucleotide
  hsa-miR-6873-3p MIMAT0027647
uucucucugucuuucucucucag

SEQ ID NO: 2690 - RNA, 22 nt, Artificial Sequence
  Synthetic oligonucleotide
  hsa-miR-4733-3p MIMAT0019858
ccaccaggucuagcauugggau

SEQ ID NO: 2691 - RNA, 21 nt, Artificial Sequence
  Synthetic oligonucleotide
  hsa-miR-3156-3p MIMAT0019209
cucccacuuccagaucuuucu

SEQ ID NO: 2692 - RNA, 22 nt, Artificial Sequence
  Synthetic oligonucleotide
  hsa-miR-4775 MIMAT0019931
uuaauuuuuuguuucggucacu

SEQ ID NO: 2693 - RNA, 21 nt, Artificial Sequence
  Synthetic oligonucleotide
  hsa-miR-4671-3p MIMAT0019753
uuagugcauagucuuuggucu

SEQ ID NO: 2694 - RNA, 23 nt, Artificial Sequence
  Synthetic oligonucleotide
  hsa-miR-4658 MIMAT0019725
gugaguguggauccuggaggaau

SEQ ID NO: 2695 - RNA, 21 nt, Artificial Sequence
  Synthetic oligonucleotide
  hsa-miR-7845-5p MIMAT0030420
aagggacagggagggucgugg

SEQ ID NO: 2696 - RNA, 22 nt, Artificial Sequence
  Synthetic oligonucleotide
  hsa-miR-933 MIMAT0004976
ugugcgcagggagaccucuccc

SEQ ID NO: 2697 - RNA, 23 nt, Artificial Sequence
  Synthetic oligonucleotide
  hsa-miR-518c-3p MIMAT0002848
caaagcgcuucucuuuagagugu

SEQ ID NO: 2698 - RNA, 22 nt, Artificial Sequence
  Synthetic oligonucleotide
  hsa-miR-3940-3p MIMAT0018356
cagcccggaucccagcccacuu

SEQ ID NO: 2699 - RNA, 21 nt, Artificial Sequence
  Synthetic oligonucleotide
  hsa-miR-4666a-3p MIMAT0019742
cauacaaucugacauguauuu

SEQ ID NO: 2700 - RNA, 22 nt, Artificial Sequence
  Synthetic oligonucleotide
  hsa-miR-218-2-3p MIMAT0004566
caugguucugucaagcaccgcg

SEQ ID NO: 2701 - RNA, 20 nt, Artificial Sequence
  Synthetic oligonucleotide
  hsa-miR-6742-3p MIMAT0027386
accuggguuguccccucuag

SEQ ID NO: 2702 - RNA, 23 nt, Artificial Sequence
  Synthetic oligonucleotide
  hsa-miR-513c-3p MIMAT0022728
uaaauuucaccuuucugagaaga

SEQ ID NO: 2703 - RNA, 22 nt, Artificial Sequence
  Synthetic oligonucleotide
  hsa-miR-519b-5p MIMAT0005454
cucuagagggaagcgcuuucug

SEQ ID NO: 2704 - RNA, 23 nt, Artificial Sequence
  Synthetic oligonucleotide
  hsa-miR-212-5p MIMAT0022695
accuuggcucuagacugcuuacu

SEQ ID NO: 2705 - RNA, 21 nt, Artificial Sequence
  Synthetic oligonucleotide
  hsa-miR-6796-3p MIMAT0027493
gaagcucuccccuccccgcag

SEQ ID NO: 2706 - RNA, 21 nt, Artificial Sequence
  Synthetic oligonucleotide
  hsa-miR-889-3p MIMAT0004921
uuaauaucggacaaccauugu

SEQ ID NO: 2707 - RNA, 23 nt, Artificial Sequence
  Synthetic oligonucleotide
  hsa-miR-2054 MIMAT0009979
cuguaauauaaauuuaauuuauu

SEQ ID NO: 2708 - RNA, 23 nt, Artificial Sequence
  Synthetic oligonucleotide
  hsa-miR-6732-3p MIMAT0027366
uaacccuguccucucccucccag

SEQ ID NO: 2709 - RNA, 22 nt, Artificial Sequence
  Synthetic oligonucleotide
  hsa-miR-15a-3p MIMAT0004488
caggccauauugugcugccuca

SEQ ID NO: 2710 - RNA, 23 nt, Artificial Sequence
  Synthetic oligonucleotide
  hsa-miR-6790-5p MIMAT0027480
gugaguguggauuuggcgggguu

SEQ ID NO: 2711 - RNA, 23 nt, Artificial Sequence
  Synthetic oligonucleotide
  hsa-miR-3614-3p MIMAT0017993
uagccuucagaucuugguguuuu

SEQ ID NO: 2712 - RNA, 23 nt, Artificial Sequence
  Synthetic oligonucleotide
  hsa-miR-574-5p MIMAT0004795
ugagugugugugugugagugugu

SEQ ID NO: 2713 - RNA, 22 nt, Artificial Sequence
  Synthetic oligonucleotide
  hsa-miR-33a-3p MIMAT0004506
caauguuuccacagugcaucac

SEQ ID NO: 2714 - RNA, 21 nt, Artificial Sequence
  Synthetic oligonucleotide
  hsa-miR-1909-5p MIMAT0007882
ugagugccggugccugcccug

SEQ ID NO: 2715 - RNA, 22 nt, Artificial Sequence
  Synthetic oligonucleotide
  hsa-miR-548g-3p MIMAT0005912
aaaacuguaauuacuuuuguac

SEQ ID NO: 2716 - RNA, 26 nt, Artificial Sequence
  Synthetic oligonucleotide
  hsa-miR-1226-5p MIMAT0005576
gugagggcaugcaggccuggaugggg

SEQ ID NO: 2717 - RNA, 23 nt, Artificial Sequence
  Synthetic oligonucleotide
  hsa-miR-4461 MIMAT0018983
gauugagacuaguagggcuaggc

SEQ ID NO: 2718 - RNA, 22 nt, Artificial Sequence
  Synthetic oligonucleotide
  hsa-miR-5580-3p MIMAT0022274
cacauaugaagugagccagcac

SEQ ID NO: 2719 - RNA, 23 nt, Artificial Sequence
  Synthetic oligonucleotide
  hsa-miR-4657 MIMAT0019724
aauguggaaguggucugaggcau

SEQ ID NO: 2720 - RNA, 20 nt, Artificial Sequence
  Synthetic oligonucleotide
  hsa-miR-3610 MIMAT0017987
gaaucggaaaggaggcgccg

SEQ ID NO: 2721 - RNA, 23 nt, Artificial Sequence
  Synthetic oligonucleotide
  hsa-miR-4767 MIMAT0019919
cgcgggcgcuccuggccgccgcc

SEQ ID NO: 2722 - RNA, 21 nt, Artificial Sequence
  Synthetic oligonucleotide
  hsa-miR-5095 MIMAT0020600
uuacaggcgugaaccaccgcg

SEQ ID NO: 2723 - RNA, 22 nt, Artificial Sequence
  Synthetic oligonucleotide
  hsa-miR-296-3p MIMAT0004679
gaggguuggguggaggcucucc

SEQ ID NO: 2724 - RNA, 22 nt, Artificial Sequence
  Synthetic oligonucleotide
  hsa-miR-655-5p MIMAT0026626
agagguuauccguguuauguuc

SEQ ID NO: 2725 - RNA, 21 nt, Artificial Sequence
  Synthetic oligonucleotide
  hsa-miR-7160-5p MIMAT0028230
ugcugagguccgggcugugcc

SEQ ID NO: 2726 - RNA, 23 nt, Artificial Sequence
  Synthetic oligonucleotide
  hsa-miR-6720-5p MIMAT0027345
uuccagcccugguaggcgccgcg

SEQ ID NO: 2727 - RNA, 21 nt, Artificial Sequence
  Synthetic oligonucleotide
  hsa-miR-4423-3p MIMAT0018936
auaggcaccaaaaagcaacaa

SEQ ID NO: 2728 - RNA, 21 nt, Artificial Sequence
  Synthetic oligonucleotide
  hsa-miR-877-3p MIMAT0004950
uccucuucucccuccucccag

SEQ ID NO: 2729 - RNA, 22 nt, Artificial Sequence
  Synthetic oligonucleotide
  hsa-miR-519c-5p MIMAT0002831
cucuagagggaagcgcuuucug

SEQ ID NO: 2730 - RNA, 21 nt, Artificial Sequence
  Synthetic oligonucleotide
  hsa-miR-6752-3p MIMAT0027405
ucccugcccccauacucccag

SEQ ID NO: 2731 - RNA, 21 nt, Artificial Sequence
  Synthetic oligonucleotide
  hsa-miR-5008-3p MIMAT0021040
ccugugcucccagggccucgc

SEQ ID NO: 2732 - RNA, 21 nt, Artificial Sequence
  Synthetic oligonucleotide
  hsa-miR-27b-3p MIMAT0000419
uucacaguggcuaaguucugc

SEQ ID NO: 2733 - RNA, 22 nt, Artificial Sequence
  Synthetic oligonucleotide
  hsa-miR-208b-3p MIMAT0004960
auaagacgaacaaaagguuugu

SEQ ID NO: 2734 - RNA, 22 nt, Artificial Sequence
  Synthetic oligonucleotide
  hsa-miR-487b-5p MIMAT0026614
gugguuaucccuguccuguucg

SEQ ID NO: 2735 - RNA, 22 nt, Artificial Sequence
  Synthetic oligonucleotide
  hsa-miR-649 MIMAT0003319
aaaccuguguuguucaagaguc

SEQ ID NO: 2736 - RNA, 20 nt, Artificial Sequence
  Synthetic oligonucleotide
  hsa-miR-326 MIMAT0000756
ccucugggcccuuccuccag

SEQ ID NO: 2737 - RNA, 21 nt, Artificial Sequence
  Synthetic oligonucleotide
  hsa-miR-8085 MIMAT0031012
ugggagagaggacugugaggc

SEQ ID NO: 2738 - RNA, 22 nt, Artificial Sequence
  Synthetic oligonucleotide
  hsa-miR-24-2-5p MIMAT0004497
ugccuacugagcugaaacacag

SEQ ID NO: 2739 - RNA, 22 nt, Artificial Sequence
  Synthetic oligonucleotide
  hsa-miR-1185-1-3p MIMAT0022838
auauacagggggagacucuuau

SEQ ID NO: 2740 - RNA, 23 nt, Artificial Sequence
  Synthetic oligonucleotide
  hsa-miR-548g-5p MIMAT0022722
ugcaaaaguaauugcaguuuuug

SEQ ID NO: 2741 - RNA, 20 nt, Artificial Sequence
  Synthetic oligonucleotide
  hsa-miR-6086 MIMAT0023711
ggagguugggaagggcagag

SEQ ID NO: 2742 - RNA, 21 nt, Artificial Sequence
  Synthetic oligonucleotide
  hsa-miR-4800-5p MIMAT0019978
aguggaccgaggaaggaagga

SEQ ID NO: 2743 - RNA, 21 nt, Artificial Sequence
  Synthetic oligonucleotide
  hsa-miR-6846-3p MIMAT0027593
ugaccccuucugucucccuag

SEQ ID NO: 2744 - RNA, 24 nt, Artificial Sequence
  Synthetic oligonucleotide
  hsa-miR-3529-3p MIMAT0022741
aacaacaaaaucacuagucuucca

SEQ ID NO: 2745 - RNA, 22 nt, Artificial Sequence
  Synthetic oligonucleotide
  hsa-miR-4661-5p MIMAT0019729
aacuagcucuguggauccugac

SEQ ID NO: 2746 - RNA, 22 nt, Artificial Sequence
  Synthetic oligonucleotide
  hsa-miR-548as-3p MIMAT0022268
uaaaacccacaauuauguuugu

SEQ ID NO: 2747 - RNA, 24 nt, Artificial Sequence
  Synthetic oligonucleotide
  hsa-miR-6817-5p MIMAT0027534
ucugccauaggaagcuuggagugg

SEQ ID NO: 2748 - RNA, 24 nt, Artificial Sequence
  Synthetic oligonucleotide
  hsa-miR-6500-5p MIMAT0025454
aggagcuauccacuccaggugucc

SEQ ID NO: 2749 - RNA, 22 nt, Artificial Sequence
  Synthetic oligonucleotide
  hsa-miR-6754-3p MIMAT0027409
ucuucaccugccucugccugca

SEQ ID NO: 2750 - RNA, 21 nt, Artificial Sequence
  Synthetic oligonucleotide
  hsa-miR-5591-3p MIMAT0022302
auacccauagcuuagcuccca

SEQ ID NO: 2751 - RNA, 22 nt, Artificial Sequence
  Synthetic oligonucleotide
  hsa-miR-16-5p MIMAT0000069
uagcagcacguaaauauuggcg

SEQ ID NO: 2752 - RNA, 22 nt, Artificial Sequence
  Synthetic oligonucleotide
  hsa-miR-3159 MIMAT0015033
uaggauuacaagugucggccac

SEQ ID NO: 2753 - RNA, 21 nt, Artificial Sequence
  Synthetic oligonucleotide
  hsa-miR-1302 MIMAT0005890
uugggacauacuuaugcuaaa

SEQ ID NO: 2754 - RNA, 19 nt, Artificial Sequence
  Synthetic oligonucleotide
  hsa-miR-558 MIMAT0003222
ugagcugcuguaccaaaau

SEQ ID NO: 2755 - RNA, 21 nt, Artificial Sequence
  Synthetic oligonucleotide
  hsa-miR-514b-3p MIMAT0015088
auugacaccucugugagugga

SEQ ID NO: 2756 - RNA, 24 nt, Artificial Sequence
  Synthetic oligonucleotide
  hsa-miR-4723-5p MIMAT0019838
ugggggagccaugagauaagagca

SEQ ID NO: 2757 - RNA, 21 nt, Artificial Sequence
  Synthetic oligonucleotide
  hsa-miR-4785 MIMAT0019949
agagucggcgacgccgccagc

SEQ ID NO: 2758 - RNA, 22 nt, Artificial Sequence
  Synthetic oligonucleotide
  hsa-miR-3671 MIMAT0018094
aucaaauaaggacuagucugca

SEQ ID NO: 2759 - RNA, 24 nt, Artificial Sequence
  Synthetic oligonucleotide
  hsa-miR-7706 MIMAT0030021
ugaagcgccugugcucugccgaga

SEQ ID NO: 2760 - RNA, 22 nt, Artificial Sequence
  Synthetic oligonucleotide
  hsa-miR-4502 MIMAT0019038
gcugaugaugauggugcugaag

SEQ ID NO: 2761 - RNA, 17 nt, Artificial Sequence
  Synthetic oligonucleotide
  hsa-miR-4294 MIMAT0016849
gggagucuacagcaggg

SEQ ID NO: 2762 - RNA, 23 nt, Artificial Sequence
  Synthetic oligonucleotide
  hsa-miR-512-5p MIMAT0002822
cacucagccuugagggcacuuuc

SEQ ID NO: 2763 - RNA, 23 nt, Artificial Sequence
  Synthetic oligonucleotide
  hsa-miR-191-5p MIMAT0000440
caacggaaucccaaaagcagcug

SEQ ID NO: 2764 - RNA, 20 nt, Artificial Sequence
  Synthetic oligonucleotide
  hsa-miR-1976 MIMAT0009451
ccuccugcccuccuugcugu

SEQ ID NO: 2765 - DNA, 22 bp, Artificial Sequence
  Synthetic oligonucleotide
  Full comp hsa-miR-576-3p MIMAT0004796
gattccaatttttccacatctt

SEQ ID NO: 2766 - DNA, 22 bp, Artificial Sequence
  Synthetic oligonucleotide
  Full comp hsa-miR-140-5p MIMAT0000431
ctaccatagggtaaaaccactg

SEQ ID NO: 2767 - DNA, 22 bp, Artificial Sequence
  Synthetic oligonucleotide
  Full comp hsa-miR-522-5p MIMAT0005451
cagaaagcgcttccctctagag

SEQ ID NO: 2768 - DNA, 22 bp, Artificial Sequence
  Synthetic oligonucleotide
  Full comp hsa-miR-1298-5p MIMAT0005800
tacatctggacagccgaatgaa

SEQ ID NO: 2769 - DNA, 22 bp, Artificial Sequence
  Synthetic oligonucleotide
  Full comp hsa-miR-133a-3p MIMAT0000427
cagctggttgaaggggaccaaa

SEQ ID NO: 2770 - DNA, 21 bp, Artificial Sequence
  Synthetic oligonucleotide
  Full comp hsa-miR-4743-3p MIMAT0022978
ctggaccagaaaagacagaaa

SEQ ID NO: 2771 - DNA, 23 bp, Artificial Sequence
  Synthetic oligonucleotide
  Full comp hsa-miR-557 MIMAT0003221
agacaaggcccacccgtgcaaac

SEQ ID NO: 2772 - DNA, 22 bp, Artificial Sequence
  Synthetic oligonucleotide
  Full comp hsa-miR-548ao-3p MIMAT0021030
tgcaaaagtagtcacggtcttt

SEQ ID NO: 2773 - DNA, 24 bp, Artificial Sequence
  Synthetic oligonucleotide
  Full comp hsa-miR-5088-5p MIMAT0021080
cctccatccaatccctgagccctg

SEQ ID NO: 2774 - DNA, 24 bp, Artificial Sequence
  Synthetic oligonucleotide
  Full comp hsa-miR-4649-5p MIMAT0019711
ctctgagagcccacccctcgccca

SEQ ID NO: 2775 - DNA, 20 bp, Artificial Sequence
  Synthetic oligonucleotide
  Full comp hsa-miR-665 MIMAT0004952
aggggcctcagcctcctggt

SEQ ID NO: 2776 - DNA, 21 bp, Artificial Sequence
  Synthetic oligonucleotide
  Full comp hsa-miR-3622b-3p MIMAT0018006
caggcacgggagctcaggtga

SEQ ID NO: 2777 - DNA, 21 bp, Artificial Sequence
  Synthetic oligonucleotide
  Full comp hsa-miR-4493 MIMAT0019028
acagagatggaaaggccttct

SEQ ID NO: 2778 - DNA, 21 bp, Artificial Sequence
  Synthetic oligonucleotide
  Full comp hsa-miR-1250-5p MIMAT0005902
aaaggccacatccagcaccgt

SEQ ID NO: 2779 - DNA, 22 bp, Artificial Sequence
  Synthetic oligonucleotide
  Full comp hsa-miR-3622a-5p MIMAT0018003
ctcacctgagctcccgtgcctg

SEQ ID NO: 2780 - DNA, 22 bp, Artificial Sequence
  Synthetic oligonucleotide
  Full comp hsa-miR-381-3p MIMAT0000736
acagagagcttgcccttgtata

SEQ ID NO: 2781 - DNA, 23 bp, Artificial Sequence
  Synthetic oligonucleotide
  Full comp hsa-miR-4709-3p MIMAT0019812
gctacagagcacctcctcttcaa

SEQ ID NO: 2782 - DNA, 21 bp, Artificial Sequence
  Synthetic oligonucleotide
  Full comp hsa-miR-7159-5p MIMAT0028228
ccatcctacacccttgttgaa

SEQ ID NO: 2783 - DNA, 23 bp, Artificial Sequence
  Synthetic oligonucleotide
  Full comp hsa-miR-6738-5p MIMAT0027377
cccctgtgctcttctacccctcg

SEQ ID NO: 2784 - DNA, 22 bp, Artificial Sequence
  Synthetic oligonucleotide
  Full comp hsa-miR-374b-3p MIMAT0004956
aatgataatacaacctgctaag

SEQ ID NO: 2785 - DNA, 23 bp, Artificial Sequence
  Synthetic oligonucleotide
  Full comp hsa-miR-6874-3p MIMAT0027649
ctagagtcagaacagcagaactg

SEQ ID NO: 2786 - DNA, 22 bp, Artificial Sequence
  Synthetic oligonucleotide
  Full comp hsa-miR-448 MIMAT0001532
atgggacatcctacatatgcaa

SEQ ID NO: 2787 - DNA, 23 bp, Artificial Sequence
  Synthetic oligonucleotide
  Full comp hsa-miR-548s MIMAT0014987
aaaataactgcagttttggccat

SEQ ID NO: 2788 - DNA, 24 bp, Artificial Sequence
  Synthetic oligonucleotide
  Full comp hsa-miR-515-5p MIMAT0002826
cagaaagtgctttcttttggagaa

SEQ ID NO: 2789 - DNA, 19 bp, Artificial Sequence
  Synthetic oligonucleotide
  Full comp hsa-miR-6891-5p MIMAT0027682
cccctcatccccctcctta

SEQ ID NO: 2790 - DNA, 20 bp, Artificial Sequence
  Synthetic oligonucleotide
  Full comp hsa-miR-3940-5p MIMAT0019229
cagagcccgccccaacccac

SEQ ID NO: 2791 - DNA, 22 bp, Artificial Sequence
  Synthetic oligonucleotide
  Full comp hsa-miR-431-3p MIMAT0004757
agaagccctgcaagacgacctg

SEQ ID NO: 2792 - DNA, 23 bp, Artificial Sequence
  Synthetic oligonucleotide
  Full comp hsa-miR-6832-5p MIMAT0027564
gaccctaacttttcctctctact

SEQ ID NO: 2793 - DNA, 23 bp, Artificial Sequence
  Synthetic oligonucleotide
  Full comp hsa-miR-103a-2-5p MIMAT0009196
caaggcagcactgtaaagaagct

SEQ ID NO: 2794 - DNA, 22 bp, Artificial Sequence
  Synthetic oligonucleotide
  Full comp hsa-miR-6877-5p MIMAT0027654
gcagcttccacccttcggccct

SEQ ID NO: 2795 - DNA, 21 bp, Artificial Sequence
  Synthetic oligonucleotide
  Full comp hsa-miR-1298-3p MIMAT0026641
gttcagtcagttgcccagatg

SEQ ID NO: 2796 - DNA, 22 bp, Artificial Sequence
  Synthetic oligonucleotide
  Full comp hsa-miR-3682-5p MIMAT0019222
atgataacacaggtagaagtag

SEQ ID NO: 2797 - DNA, 21 bp, Artificial Sequence
  Synthetic oligonucleotide
  Full comp hsa-miR-3155a MIMAT0015029
agttcccactgcagagcctgg

SEQ ID NO: 2798 - DNA, 21 bp, Artificial Sequence
  Synthetic oligonucleotide
  Full comp hsa-miR-5089-5p MIMAT0021081
gatgctactcagaaatcccac

SEQ ID NO: 2799 - DNA, 19 bp, Artificial Sequence
  Synthetic oligonucleotide
  Full comp hsa-miR-648 MIMAT0003318
accagtgccctgcacactt

SEQ ID NO: 2800 - DNA, 22 bp, Artificial Sequence
  Synthetic oligonucleotide
  Full comp hsa-miR-367-5p MIMAT0004686
agagttgcatattagcaacagt

SEQ ID NO: 2801 - DNA, 22 bp, Artificial Sequence
  Synthetic oligonucleotide
  Full comp hsa-miR-6740-5p MIMAT0027381
tctcctctctccatcccaaact

SEQ ID NO: 2802 - DNA, 22 bp, Artificial Sequence
  Synthetic oligonucleotide
  Full comp hsa-miR-450a-2-3p MIMAT0031074
atgaatgcaaaatgtccccaat

SEQ ID NO: 2803 - DNA, 20 bp, Artificial Sequence
  Synthetic oligonucleotide
  Full comp hsa-miR-6793-3p MIMAT0027487
ctgcgggcaggggttgggga

SEQ ID NO: 2804 - DNA, 22 bp, Artificial Sequence
  Synthetic oligonucleotide
  Full comp hsa-miR-3622a-3p MIMAT0018004
acaggcatgggaggtcaggtga

SEQ ID NO: 2805 - DNA, 25 bp, Artificial Sequence
  Synthetic oligonucleotide
  Full comp hsa-miR-541-5p MIMAT0004919
agtgggaccgacagcagaatccttt

SEQ ID NO: 2806 - DNA, 20 bp, Artificial Sequence
  Synthetic oligonucleotide
  Full comp hsa-miR-6515-3p MIMAT0025487
ctggggggtagatgaagaga

SEQ ID NO: 2807 - DNA, 20 bp, Artificial Sequence
  Synthetic oligonucleotide
  Full comp hsa-miR-1276 MIMAT0005930
tgtctccacagggctcttta

SEQ ID NO: 2808 - DNA, 22 bp, Artificial Sequence
  Synthetic oligonucleotide
  Full comp hsa-miR-6499-3p MIMAT0025451
tgtgggcaaaacaaacactgct

SEQ ID NO: 2809 - DNA, 22 bp, Artificial Sequence
  Synthetic oligonucleotide
  Full comp hsa-miR-2276-3p MIMAT0011775
cctcgcctctgacacttgcaga

SEQ ID NO: 2810 - DNA, 21 bp, Artificial Sequence
  Synthetic oligonucleotide
  Full comp hsa-miR-3120-3p MIMAT0014982
tgcctgtctacacttgctgtg

SEQ ID NO: 2811 - DNA, 23 bp, Artificial Sequence
  Synthetic oligonucleotide
  Full comp hsa-miR-6780b-5p MIMAT0027572
tcttccctgccaagccttcccca

SEQ ID NO: 2812 - DNA, 24 bp, Artificial Sequence
  Synthetic oligonucleotide
  Full comp hsa-miR-4769-5p MIMAT0019922
ctcataccttctctccatcccacc

SEQ ID NO: 2813 - DNA, 22 bp, Artificial Sequence
  Synthetic oligonucleotide
  Full comp hsa-miR-1306-5p MIMAT0022726
tggacgtttgcaggggaggtgg

SEQ ID NO: 2814 - DNA, 22 bp, Artificial Sequence
  Synthetic oligonucleotide
  Full comp hsa-miR-519b-3p MIMAT0002837
aacctctaaaaggatgcacttt

SEQ ID NO: 2815 - DNA, 22 bp, Artificial Sequence
  Synthetic oligonucleotide
  Full comp hsa-miR-489-3p MIMAT0002805
gctgccgtatatgtgatgtcac

SEQ ID NO: 2816 - DNA, 21 bp, Artificial Sequence
  Synthetic oligonucleotide
  Full comp hsa-miR-23a-3p MIMAT0000078
ggaaatccctggcaatgtgat

SEQ ID NO: 2817 - DNA, 23 bp, Artificial Sequence
  Synthetic oligonucleotide
  Full comp hsa-miR-6796-5p MIMAT0027492
cagccagctctccaaccccacaa

SEQ ID NO: 2818 - DNA, 20 bp, Artificial Sequence
  Synthetic oligonucleotide
  Full comp hsa-miR-675-3p MIMAT0006790
tgagcggtgagggcatacag

SEQ ID NO: 2819 - DNA, 22 bp, Artificial Sequence
  Synthetic oligonucleotide
  Full comp hsa-miR-2110 MIMAT0010133
cactcagcggccgtttccccaa

SEQ ID NO: 2820 - DNA, 22 bp, Artificial Sequence
  Synthetic oligonucleotide
  Full comp hsa-miR-1269a MIMAT0005923
ccagtagcacggctcagtccag

SEQ ID NO: 2821 - DNA, 21 bp, Artificial Sequence
  Synthetic oligonucleotide
  Full comp hsa-miR-483-3p MIMAT0002173
aagacgggaggagaggagtga

SEQ ID NO: 2822 - DNA, 22 bp, Artificial Sequence
  Synthetic oligonucleotide
  Full comp hsa-miR-4659a-3p MIMAT0019727
cgttgccatgtctaagaagaaa

SEQ ID NO: 2823 - DNA, 22 bp, Artificial Sequence
  Synthetic oligonucleotide
  Full comp hsa-miR-146a-5p MIMAT0000449
aacccatggaattcagttctca

SEQ ID NO: 2824 - DNA, 23 bp, Artificial Sequence
  Synthetic oligonucleotide
  Full comp hsa-miR-1289 MIMAT0005879
aaaatgcagattcctggactcca

SEQ ID NO: 2825 - DNA, 21 bp, Artificial Sequence
  Synthetic oligonucleotide
  Full comp hsa-miR-8485 MIMAT0033692
atacgtgtgtgtgtgtgtgtg

SEQ ID NO: 2826 - DNA, 19 bp, Artificial Sequence
  Synthetic oligonucleotide
  Full comp hsa-miR-563 MIMAT0003227
gggaaacgtatgtcaacct

SEQ ID NO: 2827 - DNA, 22 bp, Artificial Sequence
  Synthetic oligonucleotide
  Full comp hsa-miR-425-3p MIMAT0001343
gggcggacacgacattcccgat

SEQ ID NO: 2828 - DNA, 22 bp, Artificial Sequence
  Synthetic oligonucleotide
  Full comp hsa-miR-4474-3p MIMAT0019001
ttagcctcatgaccagccacaa

SEQ ID NO: 2829 - DNA, 24 bp, Artificial Sequence
  Synthetic oligonucleotide
  Full comp hsa-miR-5002-5p MIMAT0021023
actaagtgcctcagaaaccaaatt

SEQ ID NO: 2830 - DNA, 23 bp, Artificial Sequence
  Synthetic oligonucleotide
  Full comp hsa-miR-3672 MIMAT0018095
aagatgttttacatgagtctcat

SEQ ID NO: 2831 - DNA, 21 bp, Artificial Sequence
  Synthetic oligonucleotide
  Full comp hsa-let-7a-3p MIMAT0004481
gaaagacagtagattgtatag

SEQ ID NO: 2832 - DNA, 18 bp, Artificial Sequence
  Synthetic oligonucleotide
  Full comp hsa-miR-4488 MIMAT0019022
cgccggagcccgccccct

SEQ ID NO: 2833 - DNA, 23 bp, Artificial Sequence
  Synthetic oligonucleotide
  Full comp hsa-miR-3691-5p MIMAT0018120
gtaccgagtctccatcatccact

SEQ ID NO: 2834 - DNA, 21 bp, Artificial Sequence
  Synthetic oligonucleotide
  Full comp hsa-miR-3688-5p MIMAT0019223
atatggaaagactttgccact

SEQ ID NO: 2835 - DNA, 22 bp, Artificial Sequence
  Synthetic oligonucleotide
  Full comp hsa-miR-532-3p MIMAT0004780
tgcaagccttgggtgtgggagg

SEQ ID NO: 2836 - DNA, 22 bp, Artificial Sequence
  Synthetic oligonucleotide
  Full comp hsa-miR-4747-5p MIMAT0019882
ctaagaccaagcctccttccct

SEQ ID NO: 2837 - DNA, 21 bp, Artificial Sequence
  Synthetic oligonucleotide
  Full comp hsa-miR-6813-3p MIMAT0027527
ctggggagaggggccaaggtt

SEQ ID NO: 2838 - DNA, 18 bp, Artificial Sequence
  Synthetic oligonucleotide
  Full comp hsa-miR-3653-3p MIMAT0018073
cttcagtcaacttcttag

SEQ ID NO: 2839 - DNA, 21 bp, Artificial Sequence
  Synthetic oligonucleotide
  Full comp hsa-miR-3150b-3p MIMAT0018194
ccaacctcgacgatctcctca

SEQ ID NO: 2840 - DNA, 22 bp, Artificial Sequence
  Synthetic oligonucleotide
  Full comp hsa-miR-6858-5p MIMAT0027616
gtccctgccagcccctcctcac

SEQ ID NO: 2841 - DNA, 24 bp, Artificial Sequence
  Synthetic oligonucleotide
  Full comp hsa-miR-6768-3p MIMAT0027437
gtgcacaggagaatgtggcctttg

SEQ ID NO: 2842 - DNA, 21 bp, Artificial Sequence
  Synthetic oligonucleotide
  Full comp hsa-miR-4797-3p MIMAT0019973
acagagtgccacttactgaga

SEQ ID NO: 2843 - DNA, 22 bp, Artificial Sequence
  Synthetic oligonucleotide
  Full comp hsa-miR-4684-5p MIMAT0019769
tatgttgcaagtcagtagagag

SEQ ID NO: 2844 - DNA, 21 bp, Artificial Sequence
  Synthetic oligonucleotide
  Full comp hsa-miR-4638-5p MIMAT0019695
acttgtccaccgcagccgagt

SEQ ID NO: 2845 - DNA, 18 bp, Artificial Sequence
  Synthetic oligonucleotide
  Full comp hsa-miR-4300 MIMAT0016853
gaagtagtccagctccca

SEQ ID NO: 2846 - DNA, 21 bp, Artificial Sequence
  Synthetic oligonucleotide
  Full comp hsa-miR-6868-3p MIMAT0027637
ctgcacagacaacagaaggaa

SEQ ID NO: 2847 - DNA, 22 bp, Artificial Sequence
  Synthetic oligonucleotide
  Full comp hsa-miR-101-5p MIMAT0004513
agcatcagcactgtgataactg

SEQ ID NO: 2848 - DNA, 21 bp, Artificial Sequence
  Synthetic oligonucleotide
  Full comp hsa-miR-4650-3p MIMAT0019714
atgtcaggcctcattctacct

SEQ ID NO: 2849 - DNA, 21 bp, Artificial Sequence
  Synthetic oligonucleotide
  Full comp hsa-miR-6771-3p MIMAT0027443
ctgcgggtagacaggggtttg

SEQ ID NO: 2850 - DNA, 21 bp, Artificial Sequence
  Synthetic oligonucleotide
  Full comp hsa-miR-6748-3p MIMAT0027397
ctgtaggagacagggacagga

SEQ ID NO: 2851 - DNA, 27 bp, Artificial Sequence
  Synthetic oligonucleotide
  Full comp hsa-miR-1248 MIMAT0005900
tttagcacagtgcttatacaagaaggt

SEQ ID NO: 2852 - DNA, 17 bp, Artificial Sequence
  Synthetic oligonucleotide
  Full comp hsa-miR-4463 MIMAT0018987
ggccccaccccagtctc

SEQ ID NO: 2853 - DNA, 20 bp, Artificial Sequence
  Synthetic oligonucleotide
  Full comp hsa-miR-6794-5p MIMAT0027488
gctcacccccagtccccctg

SEQ ID NO: 2854 - DNA, 21 bp, Artificial Sequence
  Synthetic oligonucleotide
  Full comp hsa-miR-4763-5p MIMAT0019912
agcaggagggctgggcaggcg

SEQ ID NO: 2855 - DNA, 19 bp, Artificial Sequence
  Synthetic oligonucleotide
  Full comp hsa-miR-6132 MIMAT0024616
tgcaatccccagccctgct

SEQ ID NO: 2856 - DNA, 18 bp, Artificial Sequence
  Synthetic oligonucleotide
  Full comp hsa-miR-1306-3p MIMAT0005950
caccaccagagccaacgt

SEQ ID NO: 2857 - DNA, 22 bp, Artificial Sequence
  Synthetic oligonucleotide
  Full comp hsa-miR-579-5p MIMAT0026616
cgtcatctggcacaaaccgcga

SEQ ID NO: 2858 - DNA, 20 bp, Artificial Sequence
  Synthetic oligonucleotide
  Full comp hsa-miR-3917 MIMAT0018191
cccacctgctcagtccgagc

SEQ ID NO: 2859 - DNA, 23 bp, Artificial Sequence
  Synthetic oligonucleotide
  Full comp hsa-miR-4793-3p MIMAT0019966
agccagccaactcacagtgcaga

SEQ ID NO: 2860 - DNA, 19 bp, Artificial Sequence
  Synthetic oligonucleotide
  Full comp hsa-miR-575 MIMAT0003240
gctcctgtccaactggctc

SEQ ID NO: 2861 - DNA, 22 bp, Artificial Sequence
  Synthetic oligonucleotide
  Full comp hsa-miR-496 MIMAT0002818
gagattggccatgtaatactca

SEQ ID NO: 2862 - DNA, 20 bp, Artificial Sequence
  Synthetic oligonucleotide
  Full comp hsa-miR-320c MIMAT0005793
accctctcaacccagctttt

SEQ ID NO: 2863 - DNA, 22 bp, Artificial Sequence
  Synthetic oligonucleotide
  Full comp hsa-miR-6818-3p MIMAT0027537
ctgtgtgaggaacaagagacaa

SEQ ID NO: 2864 - DNA, 21 bp, Artificial Sequence
  Synthetic oligonucleotide
  Full comp hsa-miR-3162-3p MIMAT0019213
tggggagtggaggggtaggga

SEQ ID NO: 2865 - DNA, 24 bp, Artificial Sequence
  Synthetic oligonucleotide
  Full comp hsa-miR-661 MIMAT0003324
acgcgcaggccagagacccaggca

SEQ ID NO: 2866 - DNA, 25 bp, Artificial Sequence
  Synthetic oligonucleotide
  Full comp hsa-miR-6797-5p MIMAT0027494
tcctgttctcagccccttccctcct

SEQ ID NO: 2867 - DNA, 23 bp, Artificial Sequence
  Synthetic oligonucleotide
  Full comp hsa-miR-5705 MIMAT0022499
cacaggccatgagccccgaaaca

SEQ ID NO: 2868 - DNA, 22 bp, Artificial Sequence
  Synthetic oligonucleotide
  Full comp hsa-miR-6767-3p MIMAT0027435
ctgcggaaagagaagcacgtgg

SEQ ID NO: 2869 - DNA, 23 bp, Artificial Sequence
  Synthetic oligonucleotide
  Full comp hsa-miR-4722-5p MIMAT0019836
caacctggcacagccctcctgcc

SEQ ID NO: 2870 - DNA, 22 bp, Artificial Sequence
  Synthetic oligonucleotide
  Full comp hsa-miR-4477a MIMAT0019004
gaatcacaaatgtccttaatag

SEQ ID NO: 2871 - DNA, 22 bp, Artificial Sequence
  Synthetic oligonucleotide
  Full comp hsa-miR-375 MIMAT0000728
tcacgcgagccgaacgaacaaa

SEQ ID NO: 2872 - DNA, 21 bp, Artificial Sequence
  Synthetic oligonucleotide
  Full comp hsa-miR-424-3p MIMAT0004749
atagcagcgcctcacgttttg

SEQ ID NO: 2873 - DNA, 22 bp, Artificial Sequence
  Synthetic oligonucleotide
  Full comp hsa-miR-499b-3p MIMAT0019898
tgttaagacttgcagtgatgtt

SEQ ID NO: 2874 - DNA, 24 bp, Artificial Sequence
  Synthetic oligonucleotide
  Full comp hsa-miR-1277-5p MIMAT0022724
atacgtacatatatatatatattt

SEQ ID NO: 2875 - DNA, 23 bp, Artificial Sequence
  Synthetic oligonucleotide
  Full comp hsa-miR-1238-5p MIMAT0022947
cacacactggggctcccactcac

SEQ ID NO: 2876 - DNA, 22 bp, Artificial Sequence
  Synthetic oligonucleotide
  Full comp hsa-miR-4799-5p MIMAT0019976
gactggcatgctgcatttagat

SEQ ID NO: 2877 - DNA, 21 bp, Artificial Sequence
  Synthetic oligonucleotide
  Full comp hsa-miR-3074-5p MIMAT0019208
ctggctcagttcagcaggaac

SEQ ID NO: 2878 - DNA, 21 bp, Artificial Sequence
  Synthetic oligonucleotide
  Full comp hsa-miR-95-5p MIMAT0026473
aattcaacagacatttattga

SEQ ID NO: 2879 - DNA, 23 bp, Artificial Sequence
  Synthetic oligonucleotide
  Full comp hsa-miR-7157-5p MIMAT0028224
tctctggtgccaatgaatgctga

SEQ ID NO: 2880 - DNA, 21 bp, Artificial Sequence
  Synthetic oligonucleotide
  Full comp hsa-miR-4436a MIMAT0018952
atccacttctgcctgtcctgc

SEQ ID NO: 2881 - DNA, 19 bp, Artificial Sequence
  Synthetic oligonucleotide
  Full comp hsa-miR-4634 MIMAT0019691
ccccgggccggtcgcgccg

SEQ ID NO: 2882 - DNA, 24 bp, Artificial Sequence
  Synthetic oligonucleotide
  Full comp hsa-miR-664b-5p MIMAT0022271
tacccaatcatctcccttagccca

SEQ ID NO: 2883 - DNA, 21 bp, Artificial Sequence
  Synthetic oligonucleotide
  Full comp hsa-miR-4525 MIMAT0019064
aaccagcatgcacatcccccc

SEQ ID NO: 2884 - DNA, 21 bp, Artificial Sequence
  Synthetic oligonucleotide
  Full comp hsa-miR-486-3p MIMAT0004762
atcctgtactgagctgccccg

SEQ ID NO: 2885 - DNA, 22 bp, Artificial Sequence
  Synthetic oligonucleotide
  Full comp hsa-miR-302c-5p MIMAT0000716
cagcaggtacccccatgttaaa

SEQ ID NO: 2886 - DNA, 22 bp, Artificial Sequence
  Synthetic oligonucleotide
  Full comp hsa-miR-449a MIMAT0001541
accagctaacaatacactgcca

SEQ ID NO: 2887 - DNA, 24 bp, Artificial Sequence
  Synthetic oligonucleotide
  Full comp hsa-miR-5001-5p MIMAT0021021
agctccgccgctgagtccagccct

SEQ ID NO: 2888 - DNA, 22 bp, Artificial Sequence
  Synthetic oligonucleotide
  Full comp hsa-miR-4765 MIMAT0019916
gaacatagctatcaatcactca

SEQ ID NO: 2889 - DNA, 22 bp, Artificial Sequence
  Synthetic oligonucleotide
  Full comp hsa-miR-3619-5p MIMAT0017999
gctgcaccagcctgcctgctga

SEQ ID NO: 2890 - DNA, 21 bp, Artificial Sequence
  Synthetic oligonucleotide
  Full comp hsa-miR-7113-5p MIMAT0028123
ctcacacactgtctccctgga

SEQ ID NO: 2891 - DNA, 22 bp, Artificial Sequence
  Synthetic oligonucleotide
  Full comp hsa-miR-766-3p MIMAT0003888
gctgaggctgtggggctggagt

SEQ ID NO: 2892 - DNA, 22 bp, Artificial Sequence
  Synthetic oligonucleotide
  Full comp hsa-miR-487b-3p MIMAT0003180
aagtggatgaccctgtacgatt

SEQ ID NO: 2893 - DNA, 23 bp, Artificial Sequence
  Synthetic oligonucleotide
  Full comp hsa-miR-330-3p MIMAT0000751
tctctgcaggccgtgtgctttgc

SEQ ID NO: 2894 - DNA, 18 bp, Artificial Sequence
  Synthetic oligonucleotide
  Full comp hsa-miR-4257 MIMAT0016878
ctcagtccccacctctgg

SEQ ID NO: 2895 - DNA, 17 bp, Artificial Sequence
  Synthetic oligonucleotide
  Full comp hsa-miR-4264 MIMAT0016899
aatgaccatgactgagt

SEQ ID NO: 2896 - DNA, 22 bp, Artificial Sequence
  Synthetic oligonucleotide
  Full comp hsa-miR-489-5p MIMAT0026605
aaatggcgtcacacatacgacc

SEQ ID NO: 2897 - DNA, 22 bp, Artificial Sequence
  Synthetic oligonucleotide
  Full comp hsa-miR-92b-5p MIMAT0004792
cactgcaccgcgtcccgtccct

SEQ ID NO: 2898 - DNA, 20 bp, Artificial Sequence
  Synthetic oligonucleotide
  Full comp hsa-miR-6829-3p MIMAT0027559
ctgaggccacggaggaggca

SEQ ID NO: 2899 - DNA, 22 bp, Artificial Sequence
  Synthetic oligonucleotide
  Full comp hsa-miR-6766-3p MIMAT0027433
tgagggtgggggaagacaatca

SEQ ID NO: 2900 - DNA, 22 bp, Artificial Sequence
  Synthetic oligonucleotide
  Full comp hsa-miR-5584-5p MIMAT0022283
tctagttcttcccatttccctg

SEQ ID NO: 2901 - DNA, 18 bp, Artificial Sequence
  Synthetic oligonucleotide
  Full comp hsa-miR-4710 MIMAT0019815
aaccacctgccctcaccc

SEQ ID NO: 2902 - DNA, 20 bp, Artificial Sequence
  Synthetic oligonucleotide
  Full comp hsa-miR-3910 MIMAT0018184
tgtcttggttttatgccttt

SEQ ID NO: 2903 - DNA, 22 bp, Artificial Sequence
  Synthetic oligonucleotide
  Full comp hsa-miR-885-5p MIMAT0004947
agaggcagggtagtgtaatgga

SEQ ID NO: 2904 - DNA, 17 bp, Artificial Sequence
  Synthetic oligonucleotide
  Full comp hsa-miR-302e MIMAT0005931
aagcatggaagcactta

SEQ ID NO: 2905 - DNA, 23 bp, Artificial Sequence
  Synthetic oligonucleotide
  Full comp hsa-miR-4715-3p MIMAT0019825
attggctgcagttaaggtggcac

SEQ ID NO: 2906 - DNA, 20 bp, Artificial Sequence
  Synthetic oligonucleotide
  Full comp hsa-miR-1282 MIMAT0005940
aagcagaaaaaggcaaacga

SEQ ID NO: 2907 - DNA, 21 bp, Artificial Sequence
  Synthetic oligonucleotide
  Full comp hsa-miR-3124-5p MIMAT0014986
gactttgccttcgcccgcgaa

SEQ ID NO: 2908 - DNA, 22 bp, Artificial Sequence
  Synthetic oligonucleotide
  Full comp hsa-miR-4750-5p MIMAT0019887
cactcaaccacctccgcccgag

SEQ ID NO: 2909 - DNA, 22 bp, Artificial Sequence
  Synthetic oligonucleotide
  Full comp hsa-miR-191-3p MIMAT0001618
ggggacgaaatccaagcgcagc

SEQ ID NO: 2910 - DNA, 21 bp, Artificial Sequence
  Synthetic oligonucleotide
  Full comp hsa-miR-6841-3p MIMAT0027585
ctggggatgcagatgcaaggt

SEQ ID NO: 2911 - DNA, 19 bp, Artificial Sequence
  Synthetic oligonucleotide
  Full comp hsa-miR-1301-5p MIMAT0026639
tgctgcggtgcctagagcg

SEQ ID NO: 2912 - DNA, 22 bp, Artificial Sequence
  Synthetic oligonucleotide
  Full comp hsa-miR-3928-3p MIMAT0018205
gccgaagctccaaggttcctcc

SEQ ID NO: 2913 - DNA, 20 bp, Artificial Sequence
  Synthetic oligonucleotide
  Full comp hsa-miR-6799-5p MIMAT0027498
ccagccctgcacacctcccc

SEQ ID NO: 2914 - DNA, 22 bp, Artificial Sequence
  Synthetic oligonucleotide
  Full comp hsa-miR-20a-3p MIMAT0004493
ctttaagtgctcataatgcagt

SEQ ID NO: 2915 - DNA, 22 bp, Artificial Sequence
  Synthetic oligonucleotide
  Full comp hsa-miR-6787-3p MIMAT0027475
ctggagagggcagcagctgaga

SEQ ID NO: 2916 - DNA, 20 bp, Artificial Sequence
  Synthetic oligonucleotide
  Full comp hsa-miR-1915-3p MIMAT0007892
cccgccgcgtcgccctgggg

SEQ ID NO: 2917 - DNA, 22 bp, Artificial Sequence
  Synthetic oligonucleotide
  Full comp hsa-miR-603 MIMAT0003271
gcaaaagtaattgcagtgtgtg

SEQ ID NO: 2918 - DNA, 22 bp, Artificial Sequence
  Synthetic oligonucleotide
  Full comp hsa-miR-32-5p MIMAT0000090
tgcaacttagtaatgtgcaata

SEQ ID NO: 2919 - DNA, 22 bp, Artificial Sequence
  Synthetic oligonucleotide
  Full comp hsa-miR-5706 MIMAT0022500
agcttcagcatgttatccagaa

SEQ ID NO: 2920 - DNA, 22 bp, Artificial Sequence
  Synthetic oligonucleotide
  Full comp hsa-miR-6778-5p MIMAT0027456
acctgcctcctgtcctcccact

SEQ ID NO: 2921 - DNA, 24 bp, Artificial Sequence
  Synthetic oligonucleotide
  Full comp hsa-miR-1301-3p MIMAT0005797
gaagtcactcccaggcagctgcaa

SEQ ID NO: 2922 - DNA, 19 bp, Artificial Sequence
  Synthetic oligonucleotide
  Full comp hsa-miR-1273f MIMAT0020601
cactgcaacctccatctcc

SEQ ID NO: 2923 - DNA, 22 bp, Artificial Sequence
  Synthetic oligonucleotide
  Full comp hsa-miR-4777-5p MIMAT0019934
tatatatatctctcatctagaa

SEQ ID NO: 2924 - DNA, 22 bp, Artificial Sequence
  Synthetic oligonucleotide
  Full comp hsa-miR-3938 MIMAT0018353
ccgggttatctacaagggaatt

SEQ ID NO: 2925 - DNA, 23 bp, Artificial Sequence
  Synthetic oligonucleotide
  Full comp hsa-miR-371b-3p MIMAT0019893
gcactcaaactgtgggggcactt

SEQ ID NO: 2926 - DNA, 23 bp, Artificial Sequence
  Synthetic oligonucleotide
  Full comp hsa-miR-7112-3p MIMAT0028122
ctagggccaaaggctgtgatgca

SEQ ID NO: 2927 - DNA, 22 bp, Artificial Sequence
  Synthetic oligonucleotide
  Full comp hsa-miR-370-3p MIMAT0000722
accaggttccaccccagcaggc

SEQ ID NO: 2928 - DNA, 22 bp, Artificial Sequence
  Synthetic oligonucleotide
  Full comp hsa-miR-574-3p MIMAT0003239
tgtgggtgtgtgcatgagcgtg

SEQ ID NO: 2929 - DNA, 24 bp, Artificial Sequence
  Synthetic oligonucleotide
  Full comp hsa-miR-4751 MIMAT0019888
ccttctagcagctacgggtcctct

SEQ ID NO: 2930 - DNA, 20 bp, Artificial Sequence
  Synthetic oligonucleotide
  Full comp hsa-miR-8071 MIMAT0030998
ccacccactccagtccaccg

SEQ ID NO: 2931 - DNA, 22 bp, Artificial Sequence
  Synthetic oligonucleotide
  Full comp hsa-miR-23a-5p MIMAT0004496
aaatcccatccccaggaacccc

SEQ ID NO: 2932 - DNA, 23 bp, Artificial Sequence
  Synthetic oligonucleotide
  Full comp hsa-miR-329-5p MIMAT0026555
gaaacagaaacccagaaaacctc

SEQ ID NO: 2933 - DNA, 23 bp, Artificial Sequence
  Synthetic oligonucleotide
  Full comp hsa-miR-372-3p MIMAT0000724
acgctcaaatgtcgcagcacttt

SEQ ID NO: 2934 - DNA, 22 bp, Artificial Sequence
  Synthetic oligonucleotide
  Full comp hsa-miR-4479 MIMAT0019011
ctgctccgagcacggccgcgcg

SEQ ID NO: 2935 - DNA, 22 bp, Artificial Sequence
  Synthetic oligonucleotide
  Full comp hsa-miR-105-3p MIMAT0004516
tagcacatgctcaaacatccgt

SEQ ID NO: 2936 - DNA, 20 bp, Artificial Sequence
  Synthetic oligonucleotide
  Full comp hsa-miR-4326 MIMAT0016888
gtctgggagacagaggaaca

SEQ ID NO: 2937 - DNA, 22 bp, Artificial Sequence
  Synthetic oligonucleotide
  Full comp hsa-let-7b-5p MIMAT0000063
aaccacacaacctactacctca

SEQ ID NO: 2938 - DNA, 23 bp, Artificial Sequence
  Synthetic oligonucleotide
  Full comp hsa-miR-6751-5p MIMAT0027402
ccagacaccaacctcacccccaa

SEQ ID NO: 2939 - DNA, 21 bp, Artificial Sequence
  Synthetic oligonucleotide
  Full comp hsa-miR-3192-3p MIMAT0027027
gagctgagagggcgatcagag

SEQ ID NO: 2940 - DNA, 22 bp, Artificial Sequence
  Synthetic oligonucleotide
  Full comp hsa-miR-6856-3p MIMAT0027613
ctggaaagatcacagggctgta

SEQ ID NO: 2941 - DNA, 22 bp, Artificial Sequence
  Synthetic oligonucleotide
  Full comp hsa-miR-6807-5p MIMAT0027514
cctctccattccactggctcac

SEQ ID NO: 2942 - DNA, 25 bp, Artificial Sequence
  Synthetic oligonucleotide
  Full comp hsa-miR-6735-5p MIMAT0027371
tcagattcctgtgccctctgccctg

SEQ ID NO: 2943 - DNA, 22 bp, Artificial Sequence
  Synthetic oligonucleotide
  Full comp hsa-miR-5680 MIMAT0022468
gcagattagtccagcatttctc

SEQ ID NO: 2944 - DNA, 22 bp, Artificial Sequence
  Synthetic oligonucleotide
  Full comp hsa-miR-30a-5p MIMAT0000087
cttccagtcgaggatgtttaca

SEQ ID NO: 2945 - DNA, 21 bp, Artificial Sequence
  Synthetic oligonucleotide
  Full comp hsa-miR-1207-5p MIMAT0005871
cccctcccagcctccctgcca

SEQ ID NO: 2946 - DNA, 21 bp, Artificial Sequence
  Synthetic oligonucleotide
  Full comp hsa-miR-6844 MIMAT0027589
ctgtgaattaaaaacaaagaa

SEQ ID NO: 2947 - DNA, 21 bp, Artificial Sequence
  Synthetic oligonucleotide
  Full comp hsa-miR-4438 MIMAT0018956
actgtcttttctaagcctgtg

SEQ ID NO: 2948 - DNA, 21 bp, Artificial Sequence
  Synthetic oligonucleotide
  Full comp hsa-miR-3189-3p MIMAT0015071
ctaccccatcagacccaaggg

SEQ ID NO: 2949 - DNA, 22 bp, Artificial Sequence
  Synthetic oligonucleotide
  Full comp hsa-miR-6880-5p MIMAT0027660
gagctgccctcttcctccacca

SEQ ID NO: 2950 - DNA, 23 bp, Artificial Sequence
  Synthetic oligonucleotide
  Full comp hsa-miR-6805-3p MIMAT0027511
ctgggggcgggggagcagagcaa

SEQ ID NO: 2951 - DNA, 22 bp, Artificial Sequence
  Synthetic oligonucleotide
  Full comp hsa-miR-302b-5p MIMAT0000714
gaaagcacttccatgttaaagt

SEQ ID NO: 2952 - DNA, 23 bp, Artificial Sequence
  Synthetic oligonucleotide
  Full comp hsa-miR-623 MIMAT0003292
acccaacagcccctgcaagggat

SEQ ID NO: 2953 - DNA, 21 bp, Artificial Sequence
  Synthetic oligonucleotide
  Full comp hsa-miR-875-3p MIMAT0004923
cacaacctcagtgtttccagg

SEQ ID NO: 2954 - DNA, 21 bp, Artificial Sequence
  Synthetic oligonucleotide
  Full comp hsa-miR-6869-3p MIMAT0027639
gctgagccgatgcgcgcggcg

SEQ ID NO: 2955 - DNA, 23 bp, Artificial Sequence
  Synthetic oligonucleotide
  Full comp hsa-miR-657 MIMAT0003335
cctagagagggtgagaacctgcc

SEQ ID NO: 2956 - DNA, 22 bp, Artificial Sequence
  Synthetic oligonucleotide
  Full comp hsa-miR-4689 MIMAT0019778
ggcccccaccatgtctcctcaa

SEQ ID NO: 2957 - DNA, 22 bp, Artificial Sequence
  Synthetic oligonucleotide
  Full comp hsa-miR-136-3p MIMAT0004606
agactcatttgagacgatgatg

SEQ ID NO: 2958 - DNA, 22 bp, Artificial Sequence
  Synthetic oligonucleotide
  Full comp hsa-miR-519a-3p MIMAT0002869
acactctaaaaggatgcacttt

SEQ ID NO: 2959 - DNA, 21 bp, Artificial Sequence
  Synthetic oligonucleotide
  Full comp hsa-miR-5003-3p MIMAT0021026
ccccaacaacctagaaaagta

SEQ ID NO: 2960 - DNA, 22 bp, Artificial Sequence
  Synthetic oligonucleotide
  Full comp hsa-miR-576-5p MIMAT0003241
aaagacgtggagaaattagaat

SEQ ID NO: 2961 - DNA, 23 bp, Artificial Sequence
  Synthetic oligonucleotide
  Full comp hsa-miR-371a-3p MIMAT0000723
acactcaaaagatggcggcactt

SEQ ID NO: 2962 - DNA, 23 bp, Artificial Sequence
  Synthetic oligonucleotide
  Full comp hsa-miR-6762-3p MIMAT0027425
ctggagaccaagggaagcagcca

SEQ ID NO: 2963 - DNA, 22 bp, Artificial Sequence
  Synthetic oligonucleotide
  Full comp hsa-miR-586 MIMAT0003252
ggacctaaaaatacaatgcata

SEQ ID NO: 2964 - DNA, 21 bp, Artificial Sequence
  Synthetic oligonucleotide
  Full comp hsa-miR-621 MIMAT0003290
aggtaagcgctgttgctagcc

SEQ ID NO: 2965 - DNA, 21 bp, Artificial Sequence
  Synthetic oligonucleotide
  Full comp hsa-miR-6791-3p MIMAT0027483
ctgccggagaccaaggaggca

SEQ ID NO: 2966 - DNA, 22 bp, Artificial Sequence
  Synthetic oligonucleotide
  Full comp hsa-miR-4664-5p MIMAT0019737
aacttgcggagtgggcacccca

SEQ ID NO: 2967 - DNA, 22 bp, Artificial Sequence
  Synthetic oligonucleotide
  Full comp hsa-miR-4436b-3p MIMAT0019941
ttgtccacttcttcctgccctg

SEQ ID NO: 2968 - DNA, 22 bp, Artificial Sequence
  Synthetic oligonucleotide
  Full comp hsa-miR-3150a-5p MIMAT0019206
gctgaggagatcgtcgaggttg

SEQ ID NO: 2969 - DNA, 24 bp, Artificial Sequence
  Synthetic oligonucleotide
  Full comp hsa-miR-3692-3p MIMAT0018122
acttctgcagtgtcagtgtggaac

SEQ ID NO: 2970 - DNA, 22 bp, Artificial Sequence
  Synthetic oligonucleotide
  Full comp hsa-miR-338-5p MIMAT0004701
cactcagcaccaggatattgtt

SEQ ID NO: 2971 - DNA, 23 bp, Artificial Sequence
  Synthetic oligonucleotide
  Full comp hsa-miR-4693-3p MIMAT0019785
aaatactgtgaattccactctca

SEQ ID NO: 2972 - DNA, 22 bp, Artificial Sequence
  Synthetic oligonucleotide
  Full comp hsa-miR-543 MIMAT0004954
aagaagtgcaccgcgaatgttt

SEQ ID NO: 2973 - DNA, 18 bp, Artificial Sequence
  Synthetic oligonucleotide
  Full comp hsa-miR-151b MIMAT0010214
agactgtgagctcctcga

SEQ ID NO: 2974 - DNA, 21 bp, Artificial Sequence
  Synthetic oligonucleotide
  Full comp hsa-miR-211-3p MIMAT0022694
gcacccctttgctgtccctgc

SEQ ID NO: 2975 - DNA, 18 bp, Artificial Sequence
  Synthetic oligonucleotide
  Full comp hsa-miR-7150 MIMAT0028211
tacctctccccctgccag

SEQ ID NO: 2976 - DNA, 21 bp, Artificial Sequence
  Synthetic oligonucleotide
  Full comp hsa-miR-4445-3p MIMAT0018964
tggattgtttcttttgccgtg

SEQ ID NO: 2977 - DNA, 23 bp, Artificial Sequence
  Synthetic oligonucleotide
  Full comp hsa-miR-96-5p MIMAT0000095
agcaaaaatgtgctagtgccaaa

SEQ ID NO: 2978 - DNA, 21 bp, Artificial Sequence
  Synthetic oligonucleotide
  Full comp hsa-miR-5579-5p MIMAT0022269
gttagcttaaggagtaccata

SEQ ID NO: 2979 - DNA, 22 bp, Artificial Sequence
  Synthetic oligonucleotide
  Full comp hsa-miR-887-3p MIMAT0004951
cctcgggatggcgcccgttcac

SEQ ID NO: 2980 - DNA, 25 bp, Artificial Sequence
  Synthetic oligonucleotide
  Full comp hsa-miR-593-5p MIMAT0003261
gctgagcaatgcctggctggtgcct

SEQ ID NO: 2981 - DNA, 22 bp, Artificial Sequence
  Synthetic oligonucleotide
  Full comp hsa-miR-3689a-5p MIMAT0018117
tcccaggaaccatgatatcaca

SEQ ID NO: 2982 - DNA, 23 bp, Artificial Sequence
  Synthetic oligonucleotide
  Full comp hsa-miR-618 MIMAT0003287
actcagaaggacaagtagagttt

SEQ ID NO: 2983 - DNA, 20 bp, Artificial Sequence
  Synthetic oligonucleotide
  Full comp hsa-miR-6504-3p MIMAT0025465
agaatggctgtgctgtaatg

SEQ ID NO: 2984 - DNA, 18 bp, Artificial Sequence
  Synthetic oligonucleotide
  Full comp hsa-miR-4282 MIMAT0016912
tcctggatgcaaatttta

SEQ ID NO: 2985 - DNA, 20 bp, Artificial Sequence
  Synthetic oligonucleotide
  Full comp hsa-miR-1228-3p MIMAT0005583
ggggggcgaggcaggtgtga

SEQ ID NO: 2986 - DNA, 22 bp, Artificial Sequence
  Synthetic oligonucleotide
  Full comp hsa-miR-106a-3p MIMAT0004517
gtaagaagtgcttacattgcag

SEQ ID NO: 2987 - DNA, 22 bp, Artificial Sequence
  Synthetic oligonucleotide
  Full comp hsa-miR-491-5p MIMAT0002807
cctcatggaagggttccccact

SEQ ID NO: 2988 - DNA, 22 bp, Artificial Sequence
  Synthetic oligonucleotide
  Full comp hsa-miR-4685-3p MIMAT0019772
ctagccagggcaggaagggaga

SEQ ID NO: 2989 - DNA, 22 bp, Artificial Sequence
  Synthetic oligonucleotide
  Full comp hsa-miR-548al MIMAT0019024
tggtacaaaagtcattgccgtt

SEQ ID NO: 2990 - DNA, 21 bp, Artificial Sequence
  Synthetic oligonucleotide
  Full comp hsa-miR-6765-3p MIMAT0027431
ctgggcgggccagccaggtga

SEQ ID NO: 2991 - DNA, 20 bp, Artificial Sequence
  Synthetic oligonucleotide
  Full comp hsa-miR-511-3p MIMAT0026606
tctgtcttttgctacacatt

SEQ ID NO: 2992 - DNA, 17 bp, Artificial Sequence
  Synthetic oligonucleotide
  Full comp hsa-miR-4286 MIMAT0016916
ggtaccaggagtggggt

SEQ ID NO: 2993 - DNA, 20 bp, Artificial Sequence
  Synthetic oligonucleotide
  Full comp hsa-miR-627-3p MIMAT0026623
agtgagtctcaaagaaaaga

SEQ ID NO: 2994 - DNA, 19 bp, Artificial Sequence
  Synthetic oligonucleotide
  Full comp hsa-miR-644a MIMAT0003314
gctctaagaaagccacact

SEQ ID NO: 2995 - DNA, 22 bp, Artificial Sequence
  Synthetic oligonucleotide
  Full comp hsa-miR-124-5p MIMAT0004591
atcaaggtccgctgtgaacacg

SEQ ID NO: 2996 - DNA, 21 bp, Artificial Sequence
  Synthetic oligonucleotide
  Full comp hsa-miR-6887-3p MIMAT0027675
ctaggaggaaagtggagggga

SEQ ID NO: 2997 - DNA, 22 bp, Artificial Sequence
  Synthetic oligonucleotide
  Full comp hsa-miR-4449 MIMAT0018968
tgcctcgcgcagccccgggacg

SEQ ID NO: 2998 - DNA, 24 bp, Artificial Sequence
  Synthetic oligonucleotide
  Full comp hsa-miR-641 MIMAT0003311
gaggtgactctatcctatgtcttt

SEQ ID NO: 2999 - DNA, 22 bp, Artificial Sequence
  Synthetic oligonucleotide
  Full comp hsa-miR-1285-3p MIMAT0005876
aggtctcactttgttgcccaga

SEQ ID NO: 3000 - DNA, 23 bp, Artificial Sequence
  Synthetic oligonucleotide
  Full comp hsa-miR-1193 MIMAT0015049
gcacgtcaccggtctaccatccc

SEQ ID NO: 3001 - DNA, 23 bp, Artificial Sequence
  Synthetic oligonucleotide
  Full comp hsa-miR-3153 MIMAT0015026
aaatgtccctactcgctttcccc

SEQ ID NO: 3002 - DNA, 22 bp, Artificial Sequence
  Synthetic oligonucleotide
  Full comp hsa-miR-30a-3p MIMAT0000088
gctgcaaacatccgactgaaag

SEQ ID NO: 3003 - DNA, 19 bp, Artificial Sequence
  Synthetic oligonucleotide
  Full comp hsa-miR-4312 MIMAT0016864
tggggacaggaacaaggcc

SEQ ID NO: 3004 - DNA, 21 bp, Artificial Sequence
  Synthetic oligonucleotide
  Full comp hsa-miR-5006-5p MIMAT0021033
ttccacctcctgccctggcaa

SEQ ID NO: 3005 - DNA, 21 bp, Artificial Sequence
  Synthetic oligonucleotide
  Full comp hsa-miR-525-5p MIMAT0002838
agaaagtgcatccctctggag

SEQ ID NO: 3006 - DNA, 20 bp, Artificial Sequence
  Synthetic oligonucleotide
  Full comp hsa-miR-6733-3p MIMAT0027368
ctaggaaatccagacactga

SEQ ID NO: 3007 - DNA, 25 bp, Artificial Sequence
  Synthetic oligonucleotide
  Full comp hsa-miR-203a-5p MIMAT0031890
aactgttgaactgttaagaaccact

SEQ ID NO: 3008 - DNA, 18 bp, Artificial Sequence
  Synthetic oligonucleotide
  Full comp hsa-miR-4711-3p MIMAT0019817
atcaagccagaagacacg

SEQ ID NO: 3009 - DNA, 23 bp, Artificial Sequence
  Synthetic oligonucleotide
  Full comp hsa-miR-20b-5p MIMAT0001413
ctacctgcactatgagcactttg

SEQ ID NO: 3010 - DNA, 22 bp, Artificial Sequence
  Synthetic oligonucleotide
  Full comp hsa-miR-5699-5p MIMAT0027103
cttgtccttccttgttggggca

SEQ ID NO: 3011 - DNA, 18 bp, Artificial Sequence
  Synthetic oligonucleotide
  Full comp hsa-miR-1260a MIMAT0005911
tggtggcagaggtgggat

SEQ ID NO: 3012 - DNA, 22 bp, Artificial Sequence
  Synthetic oligonucleotide
  Full comp hsa-miR-5692c MIMAT0022476
gtacacctactgtgatattatt

SEQ ID NO: 3013 - DNA, 23 bp, Artificial Sequence
  Synthetic oligonucleotide
  Full comp hsa-miR-3161 MIMAT0015035
atctgggcctctgttcttatcag

SEQ ID NO: 3014 - DNA, 23 bp, Artificial Sequence
  Synthetic oligonucleotide
  Full comp hsa-miR-3591-5p MIMAT0019876
tcaaacgccattatcacactaaa

SEQ ID NO: 3015 - DNA, 21 bp, Artificial Sequence
  Synthetic oligonucleotide
  Full comp hsa-miR-6763-3p MIMAT0027427
ctgggggcagaggccggggag

SEQ ID NO: 3016 - DNA, 23 bp, Artificial Sequence
  Synthetic oligonucleotide
  Full comp hsa-miR-92a-1-5p MIMAT0004507
agcattgcaaccgatcccaacct

SEQ ID NO: 3017 - DNA, 23 bp, Artificial Sequence
  Synthetic oligonucleotide
  Full comp hsa-miR-548h-3p MIMAT0022723
tgcaaaagtaattgcggtttttg

SEQ ID NO: 3018 - DNA, 16 bp, Artificial Sequence
  Synthetic oligonucleotide
  Full comp hsa-miR-4297 MIMAT0016846
cacagacaggaaggca

SEQ ID NO: 3019 - DNA, 22 bp, Artificial Sequence
  Synthetic oligonucleotide
  Full comp hsa-miR-4457 MIMAT0018979
tacgccagtcaataccttgtga

SEQ ID NO: 3020 - DNA, 23 bp, Artificial Sequence
  Synthetic oligonucleotide
  Full comp hsa-miR-3680-3p MIMAT0018107
cctactcccagggtcatgcaaaa

SEQ ID NO: 3021 - DNA, 20 bp, Artificial Sequence
  Synthetic oligonucleotide
  Full comp hsa-miR-2392 MIMAT0019043
cacctctcacccccatccta

SEQ ID NO: 3022 - DNA, 25 bp, Artificial Sequence
  Synthetic oligonucleotide
  Full comp hsa-miR-548t-3p MIMAT0022730
tggtgcaaaagtaattgtggttttt

SEQ ID NO: 3023 - DNA, 20 bp, Artificial Sequence
  Synthetic oligonucleotide
  Full comp hsa-miR-4784 MIMAT0019948
tcagtcccagcatctcctca

SEQ ID NO: 3024 - DNA, 22 bp, Artificial Sequence
  Synthetic oligonucleotide
  Full comp hsa-miR-2682-3p MIMAT0013518
ggaagacagcgctgaagaggcg

SEQ ID NO: 3025 - DNA, 22 bp, Artificial Sequence
  Synthetic oligonucleotide
  Full comp hsa-miR-1273c MIMAT0015017
gacagggtctcgttttgtcgcc

SEQ ID NO: 3026 - DNA, 22 bp, Artificial Sequence
  Synthetic oligonucleotide
  Full comp hsa-miR-7112-5p MIMAT0028121
cagggtgcactgccctgcccgt

SEQ ID NO: 3027 - DNA, 21 bp, Artificial Sequence
  Synthetic oligonucleotide
  Full comp hsa-miR-5690 MIMAT0022482
cctaatagaggtagtagctga

SEQ ID NO: 3028 - DNA, 22 bp, Artificial Sequence
  Synthetic oligonucleotide
  Full comp hsa-miR-5011-3p MIMAT0021046
tgttatatatacagccatgcac

SEQ ID NO: 3029 - DNA, 22 bp, Artificial Sequence
  Synthetic oligonucleotide
  Full comp hsa-miR-4431 MIMAT0018947
accttctagttttcagagtcgc

SEQ ID NO: 3030 - DNA, 18 bp, Artificial Sequence
  Synthetic oligonucleotide
  Full comp hsa-miR-4418 MIMAT0018930
ctgctgagtcctgcagtg

SEQ ID NO: 3031 - DNA, 22 bp, Artificial Sequence
  Synthetic oligonucleotide
  Full comp hsa-miR-891a-5p MIMAT0004902
tcagtggctcaggttcgttgca

SEQ ID NO: 3032 - DNA, 20 bp, Artificial Sequence
  Synthetic oligonucleotide
  Full comp hsa-miR-378f MIMAT0018932
cttctggctccaagtccagt

SEQ ID NO: 3033 - DNA, 22 bp, Artificial Sequence
  Synthetic oligonucleotide
  Full comp hsa-miR-183-3p MIMAT0004560
ttatggcccttcggtaattcac

SEQ ID NO: 3034 - DNA, 20 bp, Artificial Sequence
  Synthetic oligonucleotide
  Full comp hsa-miR-3119 MIMAT0014981
gccatcaaagttaaaagcca

SEQ ID NO: 3035 - DNA, 22 bp, Artificial Sequence
  Synthetic oligonucleotide
  Full comp hsa-miR-4640-3p MIMAT0019700
gtgggccaggaaacagggggtg

SEQ ID NO: 3036 - DNA, 21 bp, Artificial Sequence
  Synthetic oligonucleotide
  Full comp hsa-miR-3606-3p MIMAT0022965
ctaagtagtgaaagaaatttt

SEQ ID NO: 3037 - DNA, 21 bp, Artificial Sequence
  Synthetic oligonucleotide
  Full comp hsa-miR-106b-5p MIMAT0000680
atctgcactgtcagcacttta

SEQ ID NO: 3038 - DNA, 22 bp, Artificial Sequence
  Synthetic oligonucleotide
  Full comp hsa-miR-4712-5p MIMAT0019818
gaaatgagagacctgtactgga

SEQ ID NO: 3039 - DNA, 22 bp, Artificial Sequence
  Synthetic oligonucleotide
  Full comp hsa-miR-147b MIMAT0004928
tagcagaagcatttccgcacac

SEQ ID NO: 3040 - DNA, 21 bp, Artificial Sequence
  Synthetic oligonucleotide
  Full comp hsa-miR-379-5p MIMAT0000733
cctacgttccatagtctacca

SEQ ID NO: 3041 - DNA, 22 bp, Artificial Sequence
  Synthetic oligonucleotide
  Full comp hsa-miR-4678 MIMAT0019762
tcataagtctgaacaatacctt

SEQ ID NO: 3042 - DNA, 22 bp, Artificial Sequence
  Synthetic oligonucleotide
  Full comp hsa-miR-3126-5p MIMAT0014989
tgcttctggcatctgtccctca

SEQ ID NO: 3043 - DNA, 21 bp, Artificial Sequence
  Synthetic oligonucleotide
  Full comp hsa-miR-6069 MIMAT0023694
gggggcagcaggccctagccc

SEQ ID NO: 3044 - DNA, 22 bp, Artificial Sequence
  Synthetic oligonucleotide
  Full comp hsa-miR-1255b-5p MIMAT0005945
aaccactttctttgctcatccg

SEQ ID NO: 3045 - DNA, 21 bp, Artificial Sequence
  Synthetic oligonucleotide
  Full comp hsa-miR-6715a-3p MIMAT0025841
ccacaggcacgactggtttgg

SEQ ID NO: 3046 - DNA, 17 bp, Artificial Sequence
  Synthetic oligonucleotide
  Full comp hsa-miR-4276 MIMAT0016904
gcacatgagtcactgag

SEQ ID NO: 3047 - DNA, 21 bp, Artificial Sequence
  Synthetic oligonucleotide
  Full comp hsa-miR-6812-3p MIMAT0027525
ctggggtcaggggaagagcgg

SEQ ID NO: 3048 - DNA, 21 bp, Artificial Sequence
  Synthetic oligonucleotide
  Full comp hsa-miR-4680-3p MIMAT0019765
taacaactcttacaattcaga

SEQ ID NO: 3049 - DNA, 22 bp, Artificial Sequence
  Synthetic oligonucleotide
  Full comp hsa-let-7g-5p MIMAT0000414
aactgtacaaactactacctca

SEQ ID NO: 3050 - DNA, 22 bp, Artificial Sequence
  Synthetic oligonucleotide
  Full comp hsa-miR-4757-3p MIMAT0019902
gcgaagcctctgtgacgtcatg

SEQ ID NO: 3051 - DNA, 22 bp, Artificial Sequence
  Synthetic oligonucleotide
  Full comp hsa-miR-4731-3p MIMAT0019854
agtgttgggggccacttgtgtg

SEQ ID NO: 3052 - DNA, 19 bp, Artificial Sequence
  Synthetic oligonucleotide
  Full comp hsa-miR-4645-5p MIMAT0019705
acaatatttcttgcctggt

SEQ ID NO: 3053 - DNA, 17 bp, Artificial Sequence
  Synthetic oligonucleotide
  Full comp hsa-miR-4304 MIMAT0016854
tgccctggacatgccgg

SEQ ID NO: 3054 - DNA, 22 bp, Artificial Sequence
  Synthetic oligonucleotide
  Full comp hsa-miR-4511 MIMAT0019048
agggcaaatgcaacagttcttc

SEQ ID NO: 3055 - DNA, 22 bp, Artificial Sequence
  Synthetic oligonucleotide
  Full comp hsa-miR-3658 MIMAT0018078
atctccatggtgttttcttaaa

SEQ ID NO: 3056 - DNA, 23 bp, Artificial Sequence
  Synthetic oligonucleotide
  Full comp hsa-miR-197-5p MIMAT0022691
cctcccactgccctctctacccg

SEQ ID NO: 3057 - DNA, 22 bp, Artificial Sequence
  Synthetic oligonucleotide
  Full comp hsa-miR-34b-3p MIMAT0004676
atggcagtggagttagtgattg

SEQ ID NO: 3058 - DNA, 22 bp, Artificial Sequence
  Synthetic oligonucleotide
  Full comp hsa-miR-6846-5p MIMAT0027592
actctaccccatccagccccca

SEQ ID NO: 3059 - DNA, 22 bp, Artificial Sequence
  Synthetic oligonucleotide
  Full comp hsa-miR-580-5p MIMAT0026617
atctgagtctgatgaatcatta

SEQ ID NO: 3060 - DNA, 22 bp, Artificial Sequence
  Synthetic oligonucleotide
  Full comp hsa-miR-519e-5p MIMAT0002828
gaaagtgctcccttttggagaa

SEQ ID NO: 3061 - DNA, 22 bp, Artificial Sequence
  Synthetic oligonucleotide
  Full comp hsa-miR-6715b-3p MIMAT0025843
ccacaggcacagccggtttgag

SEQ ID NO: 3062 - DNA, 23 bp, Artificial Sequence
  Synthetic oligonucleotide
  Full comp hsa-miR-494-5p MIMAT0026607
agagaagacaacacggacaacct

SEQ ID NO: 3063 - DNA, 23 bp, Artificial Sequence
  Synthetic oligonucleotide
  Full comp hsa-miR-106a-5p MIMAT0000103
ctacctgcactgtaagcactttt

SEQ ID NO: 3064 - DNA, 22 bp, Artificial Sequence
  Synthetic oligonucleotide
  Full comp hsa-miR-4714-5p MIMAT0019822
atcaacctaaggggtcagagtt

SEQ ID NO: 3065 - DNA, 20 bp, Artificial Sequence
  Synthetic oligonucleotide
  Full comp hsa-miR-599 MIMAT0003267
gtttgataaactgacacaac

SEQ ID NO: 3066 - DNA, 22 bp, Artificial Sequence
  Synthetic oligonucleotide
  Full comp hsa-miR-5697 MIMAT0022490
cctttatcatgaaactacttga

SEQ ID NO: 3067 - DNA, 24 bp, Artificial Sequence
  Synthetic oligonucleotide
  Full comp hsa-miR-216b-3p MIMAT0026721
tagaatctctacgggtaagtgtgt

SEQ ID NO: 3068 - DNA, 23 bp, Artificial Sequence
  Synthetic oligonucleotide
  Full comp hsa-miR-4682 MIMAT0019767
agaccaggctccaggaactcaga

SEQ ID NO: 3069 - DNA, 24 bp, Artificial Sequence
  Synthetic oligonucleotide
  Full comp hsa-miR-3692-5p MIMAT0018121
cagtatccactcctgaccagcagg

SEQ ID NO: 3070 - DNA, 18 bp, Artificial Sequence
  Synthetic oligonucleotide
  Full comp hsa-miR-4519 MIMAT0019056
cagccctgcgcactgctg

SEQ ID NO: 3071 - DNA, 23 bp, Artificial Sequence
  Synthetic oligonucleotide
  Full comp hsa-miR-6801-5p MIMAT0027502
tcatttcctgctgcctctgacca

SEQ ID NO: 3072 - DNA, 22 bp, Artificial Sequence
  Synthetic oligonucleotide
  Full comp hsa-miR-548v MIMAT0015020
tggtgcaaaagtaactgtagct

SEQ ID NO: 3073 - DNA, 22 bp, Artificial Sequence
  Synthetic oligonucleotide
  Full comp hsa-miR-3661 MIMAT0018082
cagctgtccgagtcccaggtca

SEQ ID NO: 3074 - DNA, 18 bp, Artificial Sequence
  Synthetic oligonucleotide
  Full comp hsa-miR-4791 MIMAT0019963
tttcagtcatcatatcca

SEQ ID NO: 3075 - DNA, 23 bp, Artificial Sequence
  Synthetic oligonucleotide
  Full comp hsa-miR-4638-3p MIMAT0019696
cggccggctgagcggtgtccagg

SEQ ID NO: 3076 - DNA, 22 bp, Artificial Sequence
  Synthetic oligonucleotide
  Full comp hsa-miR-214-5p MIMAT0004564
gcacagcaagtgtagacaggca

SEQ ID NO: 3077 - DNA, 22 bp, Artificial Sequence
  Synthetic oligonucleotide
  Full comp hsa-miR-513b-3p MIMAT0026749
tcctctcaaaaaggtgacattt

SEQ ID NO: 3078 - DNA, 21 bp, Artificial Sequence
  Synthetic oligonucleotide
  Full comp hsa-miR-6500-3p MIMAT0025455
gcaggtcatcccaacaagtgt

SEQ ID NO: 3079 - DNA, 22 bp, Artificial Sequence
  Synthetic oligonucleotide
  Full comp hsa-miR-1296-5p MIMAT0005794
ggagatggagccagggccctaa

SEQ ID NO: 3080 - DNA, 23 bp, Artificial Sequence
  Synthetic oligonucleotide
  Full comp hsa-miR-635 MIMAT0003305
ggacattgtttcagtgcccaagt

SEQ ID NO: 3081 - DNA, 21 bp, Artificial Sequence
  Synthetic oligonucleotide
  Full comp hsa-miR-6892-5p MIMAT0027684
tcctactctccggtcccttac

SEQ ID NO: 3082 - DNA, 22 bp, Artificial Sequence
  Synthetic oligonucleotide
  Full comp hsa-miR-328-3p MIMAT0000752
acggaagggcagagagggccag

SEQ ID NO: 3083 - DNA, 23 bp, Artificial Sequence
  Synthetic oligonucleotide
  Full comp hsa-miR-372-5p MIMAT0026484
agaatagtgctccacatttgagg

SEQ ID NO: 3084 - DNA, 24 bp, Artificial Sequence
  Synthetic oligonucleotide
  Full comp hsa-miR-1291 MIMAT0005881
actgctggtcttcagtcagggcca

SEQ ID NO: 3085 - DNA, 21 bp, Artificial Sequence
  Synthetic oligonucleotide
  Full comp hsa-miR-3912-3p MIMAT0018186
acatgtccatattatgcgtta

SEQ ID NO: 3086 - DNA, 21 bp, Artificial Sequence
  Synthetic oligonucleotide
  Full comp hsa-miR-190b MIMAT0004929
aacccaatatcaaacatatca

SEQ ID NO: 3087 - DNA, 22 bp, Artificial Sequence
  Synthetic oligonucleotide
  Full comp hsa-miR-4673 MIMAT0019755
tccagtccggctcctgcctgga

SEQ ID NO: 3088 - DNA, 22 bp, Artificial Sequence
  Synthetic oligonucleotide
  Full comp hsa-miR-885-3p MIMAT0004948
tatccactacaccccgctgcct

SEQ ID NO: 3089 - DNA, 21 bp, Artificial Sequence
  Synthetic oligonucleotide
  Full comp hsa-miR-6075 MIMAT0023700
caccaatgccgcctgggccgt

SEQ ID NO: 3090 - DNA, 22 bp, Artificial Sequence
  Synthetic oligonucleotide
  Full comp hsa-miR-495-5p MIMAT0022924
cgaaaataacatgggcaacttc

SEQ ID NO: 3091 - DNA, 21 bp, Artificial Sequence
  Synthetic oligonucleotide
  Full comp hsa-miR-4759 MIMAT0019905
taattccaacatctagtccta

SEQ ID NO: 3092 - DNA, 22 bp, Artificial Sequence
  Synthetic oligonucleotide
  Full comp hsa-miR-141-5p MIMAT0004598
tccaacactgtactggaagatg

SEQ ID NO: 3093 - DNA, 20 bp, Artificial Sequence
  Synthetic oligonucleotide
  Full comp hsa-miR-4484 MIMAT0019018
tggggcttctcccgcctttt

SEQ ID NO: 3094 - DNA, 22 bp, Artificial Sequence
  Synthetic oligonucleotide
  Full comp hsa-miR-643 MIMAT0003313
ctacctgagctagcatacaagt

SEQ ID NO: 3095 - DNA, 22 bp, Artificial Sequence
  Synthetic oligonucleotide
  Full comp hsa-miR-4676-3p MIMAT0019759
aagagccagtggtgaaacagtg

SEQ ID NO: 3096 - DNA, 22 bp, Artificial Sequence
  Synthetic oligonucleotide
  Full comp hsa-miR-3169 MIMAT0015044
ctatgtgccaagcacagtccta

SEQ ID NO: 3097 - DNA, 22 bp, Artificial Sequence
  Synthetic oligonucleotide
  Full comp hsa-miR-4735-5p MIMAT0019860
taccgaaggtgttcaaattagg

SEQ ID NO: 3098 - DNA, 22 bp, Artificial Sequence
  Synthetic oligonucleotide
  Full comp hsa-miR-4756-3p MIMAT0019900
ataggaaggcaaccatctctgg

SEQ ID NO: 3099 - DNA, 21 bp, Artificial Sequence
  Synthetic oligonucleotide
  Full comp hsa-miR-1908-5p MIMAT0007881
gaccaatcgccgtccccgccg

SEQ ID NO: 3100 - DNA, 21 bp, Artificial Sequence
  Synthetic oligonucleotide
  Full comp hsa-miR-2277-3p MIMAT0011777
gagccaggcagggcgctgtca

SEQ ID NO: 3101 - DNA, 23 bp, Artificial Sequence
  Synthetic oligonucleotide
  Full comp hsa-miR-3162-5p MIMAT0015036
ctccccacccttctactccctaa

SEQ ID NO: 3102 - DNA, 21 bp, Artificial Sequence
  Synthetic oligonucleotide
  Full comp hsa-miR-551b-3p MIMAT0003233
ctgaaaccaagtatgggtcgc

SEQ ID NO: 3103 - DNA, 20 bp, Artificial Sequence
  Synthetic oligonucleotide
  Full comp hsa-miR-5739 MIMAT0023116
gctccccattctctctccgc

SEQ ID NO: 3104 - DNA, 21 bp, Artificial Sequence
  Synthetic oligonucleotide
  Full comp hsa-miR-6893-5p MIMAT0027686
gctccaccctacacctgcctg

SEQ ID NO: 3105 - DNA, 21 bp, Artificial Sequence
  Synthetic oligonucleotide
  Full comp hsa-miR-548ae-3p MIMAT0018954
tgaaagtaattgcagtttttg

SEQ ID NO: 3106 - DNA, 21 bp, Artificial Sequence
  Synthetic oligonucleotide
  Full comp hsa-miR-6821-3p MIMAT0027543
ctgtgcggagcggagaggtca

SEQ ID NO: 3107 - DNA, 21 bp, Artificial Sequence
  Synthetic oligonucleotide
  Full comp hsa-miR-378i MIMAT0019074
ccttctgactcctagtccagt

SEQ ID NO: 3108 - DNA, 22 bp, Artificial Sequence
  Synthetic oligonucleotide
  Full comp hsa-miR-4539 MIMAT0019082
gcccagctcagcccagttcagc

SEQ ID NO: 3109 - DNA, 23 bp, Artificial Sequence
  Synthetic oligonucleotide
  Full comp hsa-miR-323b-5p MIMAT0001630
tgcgaactcaccacggacaacct

SEQ ID NO: 3110 - DNA, 20 bp, Artificial Sequence
  Synthetic oligonucleotide
  Full comp hsa-miR-518a-5p MIMAT0005457
gaaagggcttccctttgcag

SEQ ID NO: 3111 - DNA, 25 bp, Artificial Sequence
  Synthetic oligonucleotide
  Full comp hsa-miR-608 MIMAT0003276
acggagctgtcccaacaccacccct

SEQ ID NO: 3112 - DNA, 23 bp, Artificial Sequence
  Synthetic oligonucleotide
  Full comp hsa-miR-6514-5p MIMAT0025484
gccagctgaaagtccactccata

SEQ ID NO: 3113 - DNA, 21 bp, Artificial Sequence
  Synthetic oligonucleotide
  Full comp hsa-miR-3615 MIMAT0017994
gagccgcgaggagccgagaga

SEQ ID NO: 3114 - DNA, 23 bp, Artificial Sequence
  Synthetic oligonucleotide
  Full comp hsa-miR-770-5p MIMAT0003948
tggccctgacacgtggtactgga

SEQ ID NO: 3115 - DNA, 20 bp, Artificial Sequence
  Synthetic oligonucleotide
  Full comp hsa-miR-3621 MIMAT0018002
cctgcagaccccgacccgcg

SEQ ID NO: 3116 - DNA, 17 bp, Artificial Sequence
  Synthetic oligonucleotide
  Full comp hsa-miR-4508 MIMAT0019045
cgcgcgcccagccccgc

SEQ ID NO: 3117 - DNA, 22 bp, Artificial Sequence
  Synthetic oligonucleotide
  Full comp hsa-miR-6839-3p MIMAT0027581
ctggattgaagagaaaacccaa

SEQ ID NO: 3118 - DNA, 23 bp, Artificial Sequence
  Synthetic oligonucleotide
  Full comp hsa-miR-4698 MIMAT0019793
tggggtcttcctctacattttga

SEQ ID NO: 3119 - DNA, 22 bp, Artificial Sequence
  Synthetic oligonucleotide
  Full comp hsa-miR-4521 MIMAT0019058
ctgagcacaggacttccttagc

SEQ ID NO: 3120 - DNA, 21 bp, Artificial Sequence
  Synthetic oligonucleotide
  Full comp hsa-miR-33a-5p MIMAT0000091
tgcaatgcaactacaatgcac

SEQ ID NO: 3121 - DNA, 22 bp, Artificial Sequence
  Synthetic oligonucleotide
  Full comp hsa-miR-1287-5p MIMAT0005878
gactcgaaccactgatccagca

SEQ ID NO: 3122 - DNA, 19 bp, Artificial Sequence
  Synthetic oligonucleotide
  Full comp hsa-miR-4650-5p MIMAT0019713
aaggtagaaagaggcctga

SEQ ID NO: 3123 - DNA, 22 bp, Artificial Sequence
  Synthetic oligonucleotide
  Full comp hsa-miR-154-5p MIMAT0000452
cgaaggcaacacggataaccta

SEQ ID NO: 3124 - DNA, 21 bp, Artificial Sequence
  Synthetic oligonucleotide
  Full comp hsa-miR-6857-3p MIMAT0027615
ctgtggggagaagctcagtca

SEQ ID NO: 3125 - DNA, 22 bp, Artificial Sequence
  Synthetic oligonucleotide
  Full comp hsa-miR-449b-3p MIMAT0009203
agtggcagggtagttgtggctg

SEQ ID NO: 3126 - DNA, 23 bp, Artificial Sequence
  Synthetic oligonucleotide
  Full comp hsa-miR-3617-3p MIMAT0022966
agaaaggacatagggtgctgatg

SEQ ID NO: 3127 - DNA, 18 bp, Artificial Sequence
  Synthetic oligonucleotide
  Full comp hsa-miR-4253 MIMAT0016882
accccctggacatgccct

SEQ ID NO: 3128 - DNA, 22 bp, Artificial Sequence
  Synthetic oligonucleotide
  Full comp hsa-miR-216b-5p MIMAT0004959
tcacatttgcctgcagagattt

SEQ ID NO: 3129 - DNA, 19 bp, Artificial Sequence
  Synthetic oligonucleotide
  Full comp hsa-miR-6817-3p MIMAT0027535
tgccatggagtcagagaga

SEQ ID NO: 3130 - DNA, 22 bp, Artificial Sequence
  Synthetic oligonucleotide
  Full comp hsa-miR-1226-3p MIMAT0005577
ctagggaacacagggctggtga

SEQ ID NO: 3131 - DNA, 22 bp, Artificial Sequence
  Synthetic oligonucleotide
  Full comp hsa-miR-127-3p MIMAT0000446
agccaagctcagacggatccga

SEQ ID NO: 3132 - DNA, 22 bp, Artificial Sequence
  Synthetic oligonucleotide
  Full comp hsa-miR-5004-3p MIMAT0021028
ctgaggcccaggaaaatccaag

SEQ ID NO: 3133 - DNA, 22 bp, Artificial Sequence
  Synthetic oligonucleotide
  Full comp hsa-miR-2681-5p MIMAT0013515
agtctcctggaggtggtaaaac

SEQ ID NO: 3134 - DNA, 21 bp, Artificial Sequence
  Synthetic oligonucleotide
  Full comp hsa-miR-23b-3p MIMAT0000418
ggtaatccctggcaatgtgat

SEQ ID NO: 3135 - DNA, 22 bp, Artificial Sequence
  Synthetic oligonucleotide
  Full comp hsa-miR-3613-5p MIMAT0017990
gaacaaaaaaaaaagtacaaca

SEQ ID NO: 3136 - DNA, 21 bp, Artificial Sequence
  Synthetic oligonucleotide
  Full comp hsa-miR-5096 MIMAT0020603
gcctgaccaacatggtgaaac

SEQ ID NO: 3137 - DNA, 23 bp, Artificial Sequence
  Synthetic oligonucleotide
  Full comp hsa-miR-3614-5p MIMAT0017992
gggcagccttcagatccaagtgg

SEQ ID NO: 3138 - DNA, 21 bp, Artificial Sequence
  Synthetic oligonucleotide
  Full comp hsa-miR-6779-3p MIMAT0027459
agatgggaggagacagggctt

SEQ ID NO: 3139 - DNA, 21 bp, Artificial Sequence
  Synthetic oligonucleotide
  Full comp hsa-miR-718 MIMAT0012735
cgacgcccggcggggcggaag

SEQ ID NO: 3140 - DNA, 21 bp, Artificial Sequence
  Synthetic oligonucleotide
  Full comp hsa-miR-4718 MIMAT0019831
tgcttggtttcaggtacagct

SEQ ID NO: 3141 - DNA, 22 bp, Artificial Sequence
  Synthetic oligonucleotide
  Full comp hsa-miR-98-3p MIMAT0022842
gggaaagtagtaagttgtatag

SEQ ID NO: 3142 - DNA, 23 bp, Artificial Sequence
  Synthetic oligonucleotide
  Full comp hsa-miR-325 MIMAT0000771
acacttactggacacctactagg

SEQ ID NO: 3143 - DNA, 21 bp, Artificial Sequence
  Synthetic oligonucleotide
  Full comp hsa-miR-6795-3p MIMAT0027491
ctgggggaagaaacgaggggt

SEQ ID NO: 3144 - DNA, 22 bp, Artificial Sequence
  Synthetic oligonucleotide
  Full comp hsa-miR-5195-5p MIMAT0021126
ccatccagttgccttaggggtt

SEQ ID NO: 3145 - DNA, 22 bp, Artificial Sequence
  Synthetic oligonucleotide
  Full comp hsa-miR-6501-5p MIMAT0025458
accaaaggcagccctggcaact

SEQ ID NO: 3146 - DNA, 20 bp, Artificial Sequence
  Synthetic oligonucleotide
  Full comp hsa-miR-4520-5p MIMAT0019235
ttggacagaaaacacgcagg

SEQ ID NO: 3147 - DNA, 21 bp, Artificial Sequence
  Synthetic oligonucleotide
  Full comp hsa-miR-4774-3p MIMAT0019930
ttctggcacatgttaggcaat

SEQ ID NO: 3148 - DNA, 18 bp, Artificial Sequence
  Synthetic oligonucleotide
  Full comp hsa-miR-4323 MIMAT0016875
tctgaggctgtggggctg

SEQ ID NO: 3149 - DNA, 22 bp, Artificial Sequence
  Synthetic oligonucleotide
  Full comp hsa-miR-4750-3p MIMAT0022979
ctgcgggagggggtgggtcagg

SEQ ID NO: 3150 - DNA, 23 bp, Artificial Sequence
  Synthetic oligonucleotide
  Full comp hsa-miR-4665-5p MIMAT0019739
gctcgcgctcacgcgtcccccag

SEQ ID NO: 3151 - DNA, 23 bp, Artificial Sequence
  Synthetic oligonucleotide
  Full comp hsa-miR-302a-3p MIMAT0000684
tcaccaaaacatggaagcactta

SEQ ID NO: 3152 - DNA, 21 bp, Artificial Sequence
  Synthetic oligonucleotide
  Full comp hsa-miR-6790-3p MIMAT0027481
agtgaggggtcgccgaggtcg

SEQ ID NO: 3153 - DNA, 22 bp, Artificial Sequence
  Synthetic oligonucleotide
  Full comp hsa-miR-148b-5p MIMAT0004699
gcctgagtgtataacagaactt

SEQ ID NO: 3154 - DNA, 22 bp, Artificial Sequence
  Synthetic oligonucleotide
  Full comp hsa-miR-3129-5p MIMAT0014992
aaaccaatctctacactactgc

SEQ ID NO: 3155 - DNA, 18 bp, Artificial Sequence
  Synthetic oligonucleotide
  Full comp hsa-miR-4299 MIMAT0016851
gcctctcatgtcaccagc

SEQ ID NO: 3156 - DNA, 22 bp, Artificial Sequence
  Synthetic oligonucleotide
  Full comp hsa-miR-3972 MIMAT0019357
tgccctggaacggggctggcag

SEQ ID NO: 3157 - DNA, 23 bp, Artificial Sequence
  Synthetic oligonucleotide
  Full comp hsa-miR-5197-5p MIMAT0021130
tcaagaatgagtttgtgccattg

SEQ ID NO: 3158 - DNA, 22 bp, Artificial Sequence
  Synthetic oligonucleotide
  Full comp hsa-miR-1343-5p MIMAT0027038
cccacccgggggccgctcccca

SEQ ID NO: 3159 - DNA, 20 bp, Artificial Sequence
  Synthetic oligonucleotide
  Full comp hsa-miR-3960 MIMAT0019337
cccccgcctccgccgccgcc

SEQ ID NO: 3160 - DNA, 17 bp, Artificial Sequence
  Synthetic oligonucleotide
  Full comp hsa-miR-4303 MIMAT0016856
ctgtcctcagctcagaa

SEQ ID NO: 3161 - DNA, 24 bp, Artificial Sequence
  Synthetic oligonucleotide
  Full comp hsa-miR-3132 MIMAT0014997
tcctctgagctccttctctaccca

SEQ ID NO: 3162 - DNA, 21 bp, Artificial Sequence
  Synthetic oligonucleotide
  Full comp hsa-miR-31-5p MIMAT0000089
agctatgccagcatcttgcct

SEQ ID NO: 3163 - DNA, 22 bp, Artificial Sequence
  Synthetic oligonucleotide
  Full comp hsa-miR-541-3p MIMAT0004920
agtccagattctgtgcccacca

SEQ ID NO: 3164 - DNA, 21 bp, Artificial Sequence
  Synthetic oligonucleotide
  Full comp hsa-miR-518f-3p MIMAT0002842
cctctaaagagaagcgctttc

SEQ ID NO: 3165 - DNA, 22 bp, Artificial Sequence
  Synthetic oligonucleotide
  Full comp hsa-miR-6825-3p MIMAT0027551
tgcggagaaggcgggtcagcgc

SEQ ID NO: 3166 - DNA, 21 bp, Artificial Sequence
  Synthetic oligonucleotide
  Full comp hsa-miR-126-5p MIMAT0000444
cgcgtaccaaaagtaataatg

SEQ ID NO: 3167 - DNA, 21 bp, Artificial Sequence
  Synthetic oligonucleotide
  Full comp hsa-miR-6770-3p MIMAT0027441
ctgtgaagacacagccgccag

SEQ ID NO: 3168 - DNA, 22 bp, Artificial Sequence
  Synthetic oligonucleotide
  Full comp hsa-miR-4420 MIMAT0018933
ctcagctacagacatcagtgac

SEQ ID NO: 3169 - DNA, 21 bp, Artificial Sequence
  Synthetic oligonucleotide
  Full comp hsa-miR-1258 MIMAT0005909
ttccacgacctaatcctaact

SEQ ID NO: 3170 - DNA, 21 bp, Artificial Sequence
  Synthetic oligonucleotide
  Full comp hsa-miR-488-5p MIMAT0002804
ttgagagtgccattatctggg

SEQ ID NO: 3171 - DNA, 24 bp, Artificial Sequence
  Synthetic oligonucleotide
  Full comp hsa-miR-3138 MIMAT0015006
actccctctacctcactgtccaca

SEQ ID NO: 3172 - DNA, 22 bp, Artificial Sequence
  Synthetic oligonucleotide
  Full comp hsa-miR-4662b MIMAT0019736
atttagccaattgtccatcttt

SEQ ID NO: 3173 - DNA, 22 bp, Artificial Sequence
  Synthetic oligonucleotide
  Full comp hsa-miR-6881-3p MIMAT0027663
agtgggaaggacgaaagaggat

SEQ ID NO: 3174 - DNA, 22 bp, Artificial Sequence
  Synthetic oligonucleotide
  Full comp hsa-miR-3142 MIMAT0015011
tctgaaggttcagaaaggcctt

SEQ ID NO: 3175 - DNA, 21 bp, Artificial Sequence
  Synthetic oligonucleotide
  Full comp hsa-miR-6775-3p MIMAT0027451
ctggggcagaggacagggcct

SEQ ID NO: 3176 - DNA, 24 bp, Artificial Sequence
  Synthetic oligonucleotide
  Full comp hsa-miR-6864-5p MIMAT0027628
ggcatatctgacttgtcccttcaa

SEQ ID NO: 3177 - DNA, 23 bp, Artificial Sequence
  Synthetic oligonucleotide
  Full comp hsa-miR-6721-5p MIMAT0025852
ctcctacaataagcccctgccca

SEQ ID NO: 3178 - DNA, 23 bp, Artificial Sequence
  Synthetic oligonucleotide
  Full comp hsa-miR-6782-3p MIMAT0027465
tgcaggatggggacacaaaggtg

SEQ ID NO: 3179 - DNA, 20 bp, Artificial Sequence
  Synthetic oligonucleotide
  Full comp hsa-miR-7106-5p MIMAT0028109
cccaagatcccctcctccca

SEQ ID NO: 3180 - DNA, 23 bp, Artificial Sequence
  Synthetic oligonucleotide
  Full comp hsa-miR-139-3p MIMAT0004552
actccaacagggccgcgtctcca

SEQ ID NO: 3181 - DNA, 21 bp, Artificial Sequence
  Synthetic oligonucleotide
  Full comp hsa-miR-554 MIMAT0003217
actggctgagtcaggactagc

SEQ ID NO: 3182 - DNA, 22 bp, Artificial Sequence
  Synthetic oligonucleotide
  Full comp hsa-miR-491-3p MIMAT0004765
gtagaagggaatcttgcataag

SEQ ID NO: 3183 - DNA, 22 bp, Artificial Sequence
  Synthetic oligonucleotide
  Full comp hsa-miR-4778-3p MIMAT0019937
tcaactctgcaaaggaagaaga

SEQ ID NO: 3184 - DNA, 22 bp, Artificial Sequence
  Synthetic oligonucleotide
  Full comp hsa-miR-4659a-5p MIMAT0019726
gttttcttcttagacatggcag

SEQ ID NO: 3185 - DNA, 24 bp, Artificial Sequence
  Synthetic oligonucleotide
  Full comp hsa-miR-6882-3p MIMAT0027665
ctgcaggcaagaggagaggcagca

SEQ ID NO: 3186 - DNA, 16 bp, Artificial Sequence
  Synthetic oligonucleotide
  Full comp hsa-miR-4261 MIMAT0016890
tgggtccctgtttcct

SEQ ID NO: 3187 - DNA, 22 bp, Artificial Sequence
  Synthetic oligonucleotide
  Full comp hsa-miR-6754-5p MIMAT0027408
tcctccaaaccagcctccctgg

SEQ ID NO: 3188 - DNA, 21 bp, Artificial Sequence
  Synthetic oligonucleotide
  Full comp hsa-miR-376c-3p MIMAT0000720
acgtggaatttcctctatgtt

SEQ ID NO: 3189 - DNA, 22 bp, Artificial Sequence
  Synthetic oligonucleotide
  Full comp hsa-miR-6826-3p MIMAT0027553
ctgaacaggaaagagaggggag

SEQ ID NO: 3190 - DNA, 21 bp, Artificial Sequence
  Synthetic oligonucleotide
  Full comp hsa-miR-6867-3p MIMAT0027635
ctagtgggtaaagagggagag

SEQ ID NO: 3191 - DNA, 22 bp, Artificial Sequence
  Synthetic oligonucleotide
  Full comp hsa-miR-30b-5p MIMAT0000420
agctgagtgtaggatgtttaca

SEQ ID NO: 3192 - DNA, 22 bp, Artificial Sequence
  Synthetic oligonucleotide
  Full comp hsa-miR-5687 MIMAT0022478
atttgaccctaaaacgttctaa

SEQ ID NO: 3193 - DNA, 22 bp, Artificial Sequence
  Synthetic oligonucleotide
  Full comp hsa-miR-9-3p MIMAT0000442
actttcggttatctagctttat

SEQ ID NO: 3194 - DNA, 22 bp, Artificial Sequence
  Synthetic oligonucleotide
  Full comp hsa-miR-6858-3p MIMAT0027617
aggggtgagcaggggctggctg

SEQ ID NO: 3195 - DNA, 22 bp, Artificial Sequence
  Synthetic oligonucleotide
  Full comp hsa-miR-4697-5p MIMAT0019791
cacgtcagtgactgcgccccct

SEQ ID NO: 3196 - DNA, 22 bp, Artificial Sequence
  Synthetic oligonucleotide
  Full comp hsa-miR-2681-3p MIMAT0013516
gtgctttaccaactccatgata

SEQ ID NO: 3197 - DNA, 21 bp, Artificial Sequence
  Synthetic oligonucleotide
  Full comp hsa-miR-3684 MIMAT0018112
aaggacgtgtactaggtctaa

SEQ ID NO: 3198 - DNA, 22 bp, Artificial Sequence
  Synthetic oligonucleotide
  Full comp hsa-miR-634 MIMAT0003304
gtccaaagttggggtgctggtt

SEQ ID NO: 3199 - DNA, 22 bp, Artificial Sequence
  Synthetic oligonucleotide
  Full comp hsa-miR-208a-5p MIMAT0026474
gtataacccgggccaaaagctc

SEQ ID NO: 3200 - DNA, 23 bp, Artificial Sequence
  Synthetic oligonucleotide
  Full comp hsa-miR-567 MIMAT0003231
gttctgtcctggaagaacatact

SEQ ID NO: 3201 - DNA, 23 bp, Artificial Sequence
  Synthetic oligonucleotide
  Full comp hsa-miR-3191-3p MIMAT0015075
ctgtctggccagctacgtcccca

SEQ ID NO: 3202 - DNA, 21 bp, Artificial Sequence
  Synthetic oligonucleotide
  Full comp hsa-miR-4524b-5p MIMAT0022255
gagacaggcttatgctgctat

SEQ ID NO: 3203 - DNA, 21 bp, Artificial Sequence
  Synthetic oligonucleotide
  Full comp hsa-miR-6726-5p MIMAT0027353
acctgcagaccccagctcccg

SEQ ID NO: 3204 - DNA, 22 bp, Artificial Sequence
  Synthetic oligonucleotide
  Full comp hsa-miR-6797-3p MIMAT0027495
gtggggagggaagggtcatgca

SEQ ID NO: 3205 - DNA, 20 bp, Artificial Sequence
  Synthetic oligonucleotide
  Full comp hsa-miR-2052 MIMAT0009977
acattactgttatcaaaaca

SEQ ID NO: 3206 - DNA, 22 bp, Artificial Sequence
  Synthetic oligonucleotide
  Full comp hsa-miR-1914-5p MIMAT0007889
cagaagtgggccgggcacaggg

SEQ ID NO: 3207 - DNA, 22 bp, Artificial Sequence
  Synthetic oligonucleotide
  Full comp hsa-miR-330-5p MIMAT0004693
gcctaagacacaggcccagaga

SEQ ID NO: 3208 - DNA, 23 bp, Artificial Sequence
  Synthetic oligonucleotide
  Full comp hsa-miR-3197 MIMAT0015082
cgcctttccgagcctgcgcctcc

SEQ ID NO: 3209 - DNA, 23 bp, Artificial Sequence
  Synthetic oligonucleotide
  Full comp hsa-miR-139-5p MIMAT0000250
actggagacacgtgcactgtaga

SEQ ID NO: 3210 - DNA, 21 bp, Artificial Sequence
  Synthetic oligonucleotide
  Full comp hsa-miR-6761-5p MIMAT0027422
ctgccatcgagctctctcaga

SEQ ID NO: 3211 - DNA, 23 bp, Artificial Sequence
  Synthetic oligonucleotide
  Full comp hsa-miR-941 MIMAT0004984
gcacatgtgcacacagccgggtg

SEQ ID NO: 3212 - DNA, 21 bp, Artificial Sequence
  Synthetic oligonucleotide
  Full comp hsa-miR-4795-5p MIMAT0019968
tcaatattattagccacttct

SEQ ID NO: 3213 - DNA, 21 bp, Artificial Sequence
  Synthetic oligonucleotide
  Full comp hsa-miR-181b-3p MIMAT0022692
ttgcattcattgttcagtgag

SEQ ID NO: 3214 - DNA, 22 bp, Artificial Sequence
  Synthetic oligonucleotide
  Full comp hsa-miR-301a-5p MIMAT0022696
agtagtgcaataaagtcagagc

SEQ ID NO: 3215 - DNA, 21 bp, Artificial Sequence
  Synthetic oligonucleotide
  Full comp hsa-miR-5047 MIMAT0020541
accttacaaccgcagctgcaa

SEQ ID NO: 3216 - DNA, 19 bp, Artificial Sequence
  Synthetic oligonucleotide
  Full comp hsa-miR-548ap-3p MIMAT0021038
aaaagtaattgtggttttt

SEQ ID NO: 3217 - DNA, 21 bp, Artificial Sequence
  Synthetic oligonucleotide
  Full comp hsa-miR-571 MIMAT0003236
ctcactcagatggccaactca

SEQ ID NO: 3218 - DNA, 23 bp, Artificial Sequence
  Synthetic oligonucleotide
  Full comp hsa-miR-492 MIMAT0002812
aagaatcttgtcccgcaggtcct

SEQ ID NO: 3219 - DNA, 22 bp, Artificial Sequence
  Synthetic oligonucleotide
  Full comp hsa-miR-6855-3p MIMAT0027611
ctgtggggttgaaggtcagtct

SEQ ID NO: 3220 - DNA, 22 bp, Artificial Sequence
  Synthetic oligonucleotide
  Full comp hsa-miR-340-3p MIMAT0000750
gctataaagtaactgagacgga

SEQ ID NO: 3221 - DNA, 22 bp, Artificial Sequence
  Synthetic oligonucleotide
  Full comp hsa-miR-3160-3p MIMAT0015034
tgggctttctagtctcagctct

SEQ ID NO: 3222 - DNA, 23 bp, Artificial Sequence
  Synthetic oligonucleotide
  Full comp hsa-miR-4742-5p MIMAT0019872
tctgtaaatatccctttgcctga

SEQ ID NO: 3223 - DNA, 22 bp, Artificial Sequence
  Synthetic oligonucleotide
  Full comp hsa-miR-4446-5p MIMAT0019233
gccaagggaatggcagggaaat

SEQ ID NO: 3224 - DNA, 22 bp, Artificial Sequence
  Synthetic oligonucleotide
  Full comp hsa-miR-126-3p MIMAT0000445
cgcattattactcacggtacga

SEQ ID NO: 3225 - DNA, 22 bp, Artificial Sequence
  Synthetic oligonucleotide
  Full comp hsa-miR-451a MIMAT0001631
aactcagtaatggtaacggttt

SEQ ID NO: 3226 - DNA, 21 bp, Artificial Sequence
  Synthetic oligonucleotide
  Full comp hsa-miR-548ag MIMAT0018969
gcagaaaccacaattaccttt

SEQ ID NO: 3227 - DNA, 22 bp, Artificial Sequence
  Synthetic oligonucleotide
  Full comp hsa-miR-3194-3p MIMAT0019218
actgccagtgagcagcagagct

SEQ ID NO: 3228 - DNA, 24 bp, Artificial Sequence
  Synthetic oligonucleotide
  Full comp hsa-miR-8076 MIMAT0031003
cattgtatcagaaaagtccatata

SEQ ID NO: 3229 - DNA, 23 bp, Artificial Sequence
  Synthetic oligonucleotide
  Full comp hsa-miR-7151-5p MIMAT0028212
gccaatacaggcagagatggatc

SEQ ID NO: 3230 - DNA, 22 bp, Artificial Sequence
  Synthetic oligonucleotide
  Full comp hsa-miR-4709-5p MIMAT0019811
ttggagagcaagtcactgttgt

SEQ ID NO: 3231 - DNA, 24 bp, Artificial Sequence
  Synthetic oligonucleotide
  Full comp hsa-miR-2277-5p MIMAT0017352
gactggcagcgctcagcccgcgct

SEQ ID NO: 3232 - DNA, 22 bp, Artificial Sequence
  Synthetic oligonucleotide
  Full comp hsa-miR-526a MIMAT0002845
cagaaagtgcttccctctagag

SEQ ID NO: 3233 - DNA, 20 bp, Artificial Sequence
  Synthetic oligonucleotide
  Full comp hsa-miR-6784-5p MIMAT0027468
ccctcacccaaagccccggc

SEQ ID NO: 3234 - DNA, 22 bp, Artificial Sequence
  Synthetic oligonucleotide
  Full comp hsa-miR-4476 MIMAT0019003
gcctgtccctaaatccttcctg

SEQ ID NO: 3235 - DNA, 20 bp, Artificial Sequence
  Synthetic oligonucleotide
  Full comp hsa-miR-3125 MIMAT0014988
tctctccacagcttcctcta

SEQ ID NO: 3236 - DNA, 22 bp, Artificial Sequence
  Synthetic oligonucleotide
  Full comp hsa-miR-4498 MIMAT0019033
cagcacttgccctgccagccca

SEQ ID NO: 3237 - DNA, 23 bp, Artificial Sequence
  Synthetic oligonucleotide
  Full comp hsa-miR-103a-3p MIMAT0000101
tcatagccctgtacaatgctgct

SEQ ID NO: 3238 - DNA, 18 bp, Artificial Sequence
  Synthetic oligonucleotide
  Full comp hsa-miR-4472 MIMAT0018999
aaaacaacaccccccacc

SEQ ID NO: 3239 - DNA, 22 bp, Artificial Sequence
  Synthetic oligonucleotide
  Full comp hsa-let-7i-3p MIMAT0004585
agcaaggcagtagcttgcgcag

SEQ ID NO: 3240 - DNA, 22 bp, Artificial Sequence
  Synthetic oligonucleotide
  Full comp hsa-miR-5702 MIMAT0022495
catgggatatgttgctgactca

SEQ ID NO: 3241 - DNA, 23 bp, Artificial Sequence
  Synthetic oligonucleotide
  Full comp hsa-miR-199b-5p MIMAT0000263
gaacagatagtctaaacactggg

SEQ ID NO: 3242 - DNA, 19 bp, Artificial Sequence
  Synthetic oligonucleotide
  Full comp hsa-miR-383-3p MIMAT0026485
tctgaccaggcagtgctgt

SEQ ID NO: 3243 - DNA, 22 bp, Artificial Sequence
  Synthetic oligonucleotide
  Full comp hsa-miR-4696 MIMAT0019790
agatgacagtatccgtcttgca

SEQ ID NO: 3244 - DNA, 21 bp, Artificial Sequence
  Synthetic oligonucleotide
  Full comp hsa-miR-8062 MIMAT0030989
gcaataatcctcaaatcactg

SEQ ID NO: 3245 - DNA, 21 bp, Artificial Sequence
  Synthetic oligonucleotide
  Full comp hsa-miR-518e-3p MIMAT0002861
cactctgaagggaagcgcttt

SEQ ID NO: 3246 - DNA, 21 bp, Artificial Sequence
  Synthetic oligonucleotide
  Full comp hsa-miR-7114-5p MIMAT0028125
acaggcaccccactccacaga

SEQ ID NO: 3247 - DNA, 23 bp, Artificial Sequence
  Synthetic oligonucleotide
  Full comp hsa-miR-6821-5p MIMAT0027542
ccccgcctcgagccaccacgcac

SEQ ID NO: 3248 - DNA, 21 bp, Artificial Sequence
  Synthetic oligonucleotide
  Full comp hsa-miR-6879-3p MIMAT0027659
ctgggcaaggagcgggtgaca

SEQ ID NO: 3249 - DNA, 22 bp, Artificial Sequence
  Synthetic oligonucleotide
  Full comp hsa-miR-5580-5p MIMAT0022273
acacatatgaaatgagccagca

SEQ ID NO: 3250 - DNA, 20 bp, Artificial Sequence
  Synthetic oligonucleotide
  Full comp hsa-miR-8079 MIMAT0031006
gccagcagagacgatcactg

SEQ ID NO: 3251 - DNA, 20 bp, Artificial Sequence
  Synthetic oligonucleotide
  Full comp hsa-miR-527 MIMAT0002862
gaaagggcttccctttgcag

SEQ ID NO: 3252 - DNA, 22 bp, Artificial Sequence
  Synthetic oligonucleotide
  Full comp hsa-miR-450a-1-3p MIMAT0022700
atacatgcaaaatgttcccaat

SEQ ID NO: 3253 - DNA, 17 bp, Artificial Sequence
  Synthetic oligonucleotide
  Full comp hsa-miR-4499 MIMAT0019035
tccctcctctcagtctt

SEQ ID NO: 3254 - DNA, 21 bp, Artificial Sequence
  Synthetic oligonucleotide
  Full comp hsa-miR-4781-5p MIMAT0019942
ccaatattggaatccccgcta

SEQ ID NO: 3255 - DNA, 18 bp, Artificial Sequence
  Synthetic oligonucleotide
  Full comp hsa-miR-1321 MIMAT0005952
atcacattcacctccctg

SEQ ID NO: 3256 - DNA, 19 bp, Artificial Sequence
  Synthetic oligonucleotide
  Full comp hsa-miR-585-3p MIMAT0003250
tagcatacagatacgccca

SEQ ID NO: 3257 - DNA, 18 bp, Artificial Sequence
  Synthetic oligonucleotide
  Full comp hsa-miR-4305 MIMAT0016857
gaactggaggtgtctagg

SEQ ID NO: 3258 - DNA, 22 bp, Artificial Sequence
  Synthetic oligonucleotide
  Full comp hsa-miR-2276-5p MIMAT0026921
cgtctgcaaggtgacagagggc

SEQ ID NO: 3259 - DNA, 22 bp, Artificial Sequence
  Synthetic oligonucleotide
  Full comp hsa-miR-329-3p MIMAT0001629
aaagaggttaaccaggtgtgtt

SEQ ID NO: 3260 - DNA, 22 bp, Artificial Sequence
  Synthetic oligonucleotide
  Full comp hsa-miR-1915-5p MIMAT0007891
ggcccgggcagcaaggcaaggt

SEQ ID NO: 3261 - DNA, 21 bp, Artificial Sequence
  Synthetic oligonucleotide
  Full comp hsa-miR-224-5p MIMAT0000281
aacggaaccactagtgacttg

SEQ ID NO: 3262 - DNA, 22 bp, Artificial Sequence
  Synthetic oligonucleotide
  Full comp hsa-miR-6840-3p MIMAT0027583
caccccgcacaaagtcctgggc

SEQ ID NO: 3263 - DNA, 22 bp, Artificial Sequence
  Synthetic oligonucleotide
  Full comp hsa-miR-6072 MIMAT0023697
ctaaggtgcagtgtgatgagga

SEQ ID NO: 3264 - DNA, 24 bp, Artificial Sequence
  Synthetic oligonucleotide
  Full comp hsa-miR-6079 MIMAT0023704
cagctagttggtccaagcttccaa

SEQ ID NO: 3265 - DNA, 24 bp, Artificial Sequence
  Synthetic oligonucleotide
  Full comp hsa-miR-6511b-5p MIMAT0025847
tgtcagccccacttctgcctgcag

SEQ ID NO: 3266 - DNA, 22 bp, Artificial Sequence
  Synthetic oligonucleotide
  Full comp hsa-miR-548ax MIMAT0022474
tggcaaaaccgcaattacttct

SEQ ID NO: 3267 - DNA, 20 bp, Artificial Sequence
  Synthetic oligonucleotide
  Full comp hsa-miR-144-3p MIMAT0000436
agtacatcatctatactgta

SEQ ID NO: 3268 - DNA, 22 bp, Artificial Sequence
  Synthetic oligonucleotide
  Full comp hsa-miR-4700-5p MIMAT0019796
acacactgtcctcatccccaga

SEQ ID NO: 3269 - DNA, 17 bp, Artificial Sequence
  Synthetic oligonucleotide
  Full comp hsa-miR-4442 MIMAT0018960
cctccctcttgtccggc

SEQ ID NO: 3270 - DNA, 23 bp, Artificial Sequence
  Synthetic oligonucleotide
  Full comp hsa-miR-3945 MIMAT0018361
atatcaaccctctcctatgccct

SEQ ID NO: 3271 - DNA, 22 bp, Artificial Sequence
  Synthetic oligonucleotide
  Full comp hsa-miR-4713-5p MIMAT0019820
tgggagcctggtagtgggagaa

SEQ ID NO: 3272 - DNA, 22 bp, Artificial Sequence
  Synthetic oligonucleotide
  Full comp hsa-miR-520h MIMAT0002867
actctaaagggaagcactttgt

SEQ ID NO: 3273 - DNA, 23 bp, Artificial Sequence
  Synthetic oligonucleotide
  Full comp hsa-miR-3616-3p MIMAT0017996
gcctgcatcatgaaatgccctcg

SEQ ID NO: 3274 - DNA, 21 bp, Artificial Sequence
  Synthetic oligonucleotide
  Full comp hsa-miR-499a-5p MIMAT0002870
aaacatcactgcaagtcttaa

SEQ ID NO: 3275 - DNA, 17 bp, Artificial Sequence
  Synthetic oligonucleotide
  Full comp hsa-miR-4532 MIMAT0019071
cgccgggctccccgggg

SEQ ID NO: 3276 - DNA, 18 bp, Artificial Sequence
  Synthetic oligonucleotide
  Full comp hsa-miR-4311 MIMAT0016863
cacactcagctctctttc

SEQ ID NO: 3277 - DNA, 18 bp, Artificial Sequence
  Synthetic oligonucleotide
  Full comp hsa-miR-4514 MIMAT0019051
ttccccaatcctgcctgt

SEQ ID NO: 3278 - DNA, 22 bp, Artificial Sequence
  Synthetic oligonucleotide
  Full comp hsa-miR-374a-3p MIMAT0004688
aattacaatacaatctgataag

SEQ ID NO: 3279 - DNA, 22 bp, Artificial Sequence
  Synthetic oligonucleotide
  Full comp hsa-miR-141-3p MIMAT0000432
ccatctttaccagacagtgtta

SEQ ID NO: 3280 - DNA, 24 bp, Artificial Sequence
  Synthetic oligonucleotide
  Full comp hsa-miR-6856-5p MIMAT0027612
ccacagcaccactgctcctctctt

SEQ ID NO: 3281 - DNA, 22 bp, Artificial Sequence
  Synthetic oligonucleotide
  Full comp hsa-miR-186-5p MIMAT0000456
agcccaaaaggagaattctttg

SEQ ID NO: 3282 - DNA, 23 bp, Artificial Sequence
  Synthetic oligonucleotide
  Full comp hsa-miR-339-5p MIMAT0000764
cgtgagctcctggaggacaggga

SEQ ID NO: 3283 - DNA, 22 bp, Artificial Sequence
  Synthetic oligonucleotide
  Full comp hsa-miR-486-5p MIMAT0002177
ctcggggcagctcagtacagga

SEQ ID NO: 3284 - DNA, 21 bp, Artificial Sequence
  Synthetic oligonucleotide
  Full comp hsa-miR-3927-5p MIMAT0022970
acaggcagatatgtgataggc

SEQ ID NO: 3285 - DNA, 18 bp, Artificial Sequence
  Synthetic oligonucleotide
  Full comp hsa-miR-7515 MIMAT0029310
gtcaccatcttcccttct

SEQ ID NO: 3286 - DNA, 22 bp, Artificial Sequence
  Synthetic oligonucleotide
  Full comp hsa-miR-548j-5p MIMAT0005875
accaaagaccgcaattactttt

SEQ ID NO: 3287 - DNA, 21 bp, Artificial Sequence
  Synthetic oligonucleotide
  Full comp hsa-miR-548ay-5p MIMAT0025452
gcaaaaaccacaattactttt

SEQ ID NO: 3288 - DNA, 22 bp, Artificial Sequence
  Synthetic oligonucleotide
  Full comp hsa-miR-3936 MIMAT0018351
tgcatctgccatacacccctta

SEQ ID NO: 3289 - DNA, 18 bp, Artificial Sequence
  Synthetic oligonucleotide
  Full comp hsa-miR-4320 MIMAT0016871
aggaagctacagaatccc

SEQ ID NO: 3290 - DNA, 22 bp, Artificial Sequence
  Synthetic oligonucleotide
  Full comp hsa-miR-4782-3p MIMAT0019945
gttctagatatgaagacaatca

SEQ ID NO: 3291 - DNA, 21 bp, Artificial Sequence
  Synthetic oligonucleotide
  Full comp hsa-miR-1273h-5p MIMAT0030415
actgcagccttgacctcccag

SEQ ID NO: 3292 - DNA, 21 bp, Artificial Sequence
  Synthetic oligonucleotide
  Full comp hsa-miR-6823-3p MIMAT0027547
ctggagggaaggagaggctca

SEQ ID NO: 3293 - DNA, 20 bp, Artificial Sequence
  Synthetic oligonucleotide
  Full comp hsa-miR-3117-5p MIMAT0019197
atatgactcgtatagtgtct

SEQ ID NO: 3294 - DNA, 21 bp, Artificial Sequence
  Synthetic oligonucleotide
  Full comp hsa-miR-218-5p MIMAT0000275
acatggttagatcaagcacaa

SEQ ID NO: 3295 - DNA, 22 bp, Artificial Sequence
  Synthetic oligonucleotide
  Full comp hsa-miR-663b MIMAT0005867
cctcaggcacggccgggccacc

SEQ ID NO: 3296 - DNA, 17 bp, Artificial Sequence
  Synthetic oligonucleotide
  Full comp hsa-miR-1279 MIMAT0005937
agaaagaagcaatatga

SEQ ID NO: 3297 - DNA, 23 bp, Artificial Sequence
  Synthetic oligonucleotide
  Full comp hsa-miR-4656 MIMAT0019723
acaggcctcctgccctcagccca

SEQ ID NO: 3298 - DNA, 23 bp, Artificial Sequence
  Synthetic oligonucleotide
  Full comp hsa-miR-135a-5p MIMAT0000428
tcacataggaataaaaagccata

SEQ ID NO: 3299 - DNA, 23 bp, Artificial Sequence
  Synthetic oligonucleotide
  Full comp hsa-miR-3922-5p MIMAT0019227
tgctgtgggacctctggccttga

SEQ ID NO: 3300 - DNA, 22 bp, Artificial Sequence
  Synthetic oligonucleotide
  Full comp hsa-miR-3186-5p MIMAT0015067
aagccacgtagacagacgcctg

SEQ ID NO: 3301 - DNA, 22 bp, Artificial Sequence
  Synthetic oligonucleotide
  Full comp hsa-miR-6785-5p MIMAT0027470
caccatcatccacgccctccca

SEQ ID NO: 3302 - DNA, 22 bp, Artificial Sequence
  Synthetic oligonucleotide
  Full comp hsa-miR-6723-5p MIMAT0025855
gccccgacgttactcggactat

SEQ ID NO: 3303 - DNA, 23 bp, Artificial Sequence
  Synthetic oligonucleotide
  Full comp hsa-miR-2053 MIMAT0009978
gtaaatagaggtttaattaacac

SEQ ID NO: 3304 - DNA, 20 bp, Artificial Sequence
  Synthetic oligonucleotide
  Full comp hsa-miR-1587 MIMAT0019077
cccaacccagcccagcccaa

SEQ ID NO: 3305 - DNA, 23 bp, Artificial Sequence
  Synthetic oligonucleotide
  Full comp hsa-miR-93-5p MIMAT0000093
ctacctgcacgaacagcactttg

SEQ ID NO: 3306 - DNA, 21 bp, Artificial Sequence
  Synthetic oligonucleotide
  Full comp hsa-miR-376c-5p MIMAT0022861
aacatagaaggaatatccacc

SEQ ID NO: 3307 - DNA, 21 bp, Artificial Sequence
  Synthetic oligonucleotide
  Full comp hsa-miR-6816-5p MIMAT0027532
gcagggacctgccccgcccca

SEQ ID NO: 3308 - DNA, 23 bp, Artificial Sequence
  Synthetic oligonucleotide
  Full comp hsa-miR-4452 MIMAT0018974
atcacttaaggccaagaattcaa

SEQ ID NO: 3309 - DNA, 22 bp, Artificial Sequence
  Synthetic oligonucleotide
  Full comp hsa-miR-548k MIMAT0005882
agcaaaatccgcaagtactttt

SEQ ID NO: 3310 - DNA, 21 bp, Artificial Sequence
  Synthetic oligonucleotide
  Full comp hsa-miR-6736-5p MIMAT0027373
accacagatgccctcacccag

SEQ ID NO: 3311 - DNA, 22 bp, Artificial Sequence
  Synthetic oligonucleotide
  Full comp hsa-miR-1236-5p MIMAT0022945
tccccatttcccctgtcactca

SEQ ID NO: 3312 - DNA, 22 bp, Artificial Sequence
  Synthetic oligonucleotide
  Full comp hsa-miR-764 MIMAT0010367
aggaggacaagtgagcacctgc

SEQ ID NO: 3313 - DNA, 22 bp, Artificial Sequence
  Synthetic oligonucleotide
  Full comp hsa-miR-208b-5p MIMAT0026722
acataattcgagcaaaaagctt

SEQ ID NO: 3314 - DNA, 22 bp, Artificial Sequence
  Synthetic oligonucleotide
  Full comp hsa-miR-4482-5p MIMAT0019016
catttccatagcccactgggtt

SEQ ID NO: 3315 - DNA, 22 bp, Artificial Sequence
  Synthetic oligonucleotide
  Full comp hsa-miR-6866-3p MIMAT0027633
ctagaggacagataaagggatc

SEQ ID NO: 3316 - DNA, 22 bp, Artificial Sequence
  Synthetic oligonucleotide
  Full comp hsa-miR-518f-5p MIMAT0002841
gagaaagtgcttccctctagag

SEQ ID NO: 3317 - DNA, 19 bp, Artificial Sequence
  Synthetic oligonucleotide
  Full comp hsa-miR-4330 MIMAT0016924
gcaaggctctgatctgagg

SEQ ID NO: 3318 - DNA, 23 bp, Artificial Sequence
  Synthetic oligonucleotide
  Full comp hsa-miR-6511b-3p MIMAT0025848
tgcaggcagaaggggtggtgagg

SEQ ID NO: 3319 - DNA, 24 bp, Artificial Sequence
  Synthetic oligonucleotide
  Full comp hsa-miR-6750-5p MIMAT0027400
agcagctcacccagctgttccctg

SEQ ID NO: 3320 - DNA, 21 bp, Artificial Sequence
  Synthetic oligonucleotide
  Full comp hsa-miR-4501 MIMAT0019037
tgattcatccgaggtcacata

SEQ ID NO: 3321 - DNA, 22 bp, Artificial Sequence
  Synthetic oligonucleotide
  Full comp hsa-miR-8067 MIMAT0030994
gactaagtttacagtttctagg

SEQ ID NO: 3322 - DNA, 21 bp, Artificial Sequence
  Synthetic oligonucleotide
  Full comp hsa-miR-4803 MIMAT0019983
tcaatccacactattatgtta

SEQ ID NO: 3323 - DNA, 21 bp, Artificial Sequence
  Synthetic oligonucleotide
  Full comp hsa-miR-887-5p MIMAT0026720
gagtctaacagggctcccaag

SEQ ID NO: 3324 - DNA, 22 bp, Artificial Sequence
  Synthetic oligonucleotide
  Full comp hsa-miR-6509-3p MIMAT0025475
aaattaggtagtggcagtggaa

SEQ ID NO: 3325 - DNA, 22 bp, Artificial Sequence
  Synthetic oligonucleotide
  Full comp hsa-miR-7107-5p MIMAT0028111
cccttcctcctccccaggccga

SEQ ID NO: 3326 - DNA, 22 bp, Artificial Sequence
  Synthetic oligonucleotide
  Full comp hsa-miR-4772-3p MIMAT0019927
tctgatcaggcaaagttgcagg

SEQ ID NO: 3327 - DNA, 23 bp, Artificial Sequence
  Synthetic oligonucleotide
  Full comp hsa-miR-614 MIMAT0003282
ccacctggcaagaacaggcgttc

SEQ ID NO: 3328 - DNA, 22 bp, Artificial Sequence
  Synthetic oligonucleotide
  Full comp hsa-miR-3193 MIMAT0015077
actcctcagatcctacgcagga

SEQ ID NO: 3329 - DNA, 23 bp, Artificial Sequence
  Synthetic oligonucleotide
  Full comp hsa-miR-4783-3p MIMAT0019947
gcagacgcgccccaacaccgggg

SEQ ID NO: 3330 - DNA, 19 bp, Artificial Sequence
  Synthetic oligonucleotide
  Full comp hsa-miR-1250-3p MIMAT0026740
tgaatgggctggaaaatgt

SEQ ID NO: 3331 - DNA, 22 bp, Artificial Sequence
  Synthetic oligonucleotide
  Full comp hsa-miR-6761-3p MIMAT0027423
ggagtgagagagcagcgtagga

SEQ ID NO: 3332 - DNA, 23 bp, Artificial Sequence
  Synthetic oligonucleotide
  Full comp hsa-miR-6734-3p MIMAT0027370
ctgagagaagagtgagggaaggg

SEQ ID NO: 3333 - DNA, 21 bp, Artificial Sequence
  Synthetic oligonucleotide
  Full comp hsa-miR-892a MIMAT0004907
ctacgcagaaaggacacagtg

SEQ ID NO: 3334 - DNA, 22 bp, Artificial Sequence
  Synthetic oligonucleotide
  Full comp hsa-miR-379-3p MIMAT0004690
agttagtggaccatgttacata

SEQ ID NO: 3335 - DNA, 22 bp, Artificial Sequence
  Synthetic oligonucleotide
  Full comp hsa-miR-1304-3p MIMAT0022720
ggggttcgaggctacagtgaga

SEQ ID NO: 3336 - DNA, 18 bp, Artificial Sequence
  Synthetic oligonucleotide
  Full comp hsa-miR-4530 MIMAT0019069
cgctcccgtcctgctggg

SEQ ID NO: 3337 - DNA, 23 bp, Artificial Sequence
  Synthetic oligonucleotide
  Full comp hsa-miR-4707-5p MIMAT0019807
ccagaacccgcccgcgccggggc

SEQ ID NO: 3338 - DNA, 21 bp, Artificial Sequence
  Synthetic oligonucleotide
  Full comp hsa-miR-6068 MIMAT0023693
ccaccgccggagactcgcagg

SEQ ID NO: 3339 - DNA, 22 bp, Artificial Sequence
  Synthetic oligonucleotide
  Full comp hsa-miR-24-1-5p MIMAT0000079
actgatatcagctcagtaggca

SEQ ID NO: 3340 - DNA, 22 bp, Artificial Sequence
  Synthetic oligonucleotide
  Full comp hsa-miR-3689e MIMAT0019009
tcccaggaaccatgatatcaca

SEQ ID NO: 3341 - DNA, 22 bp, Artificial Sequence
  Synthetic oligonucleotide
  Full comp hsa-miR-5584-3p MIMAT0022284
aattgggcaaagggaagaacta

SEQ ID NO: 3342 - DNA, 22 bp, Artificial Sequence
  Synthetic oligonucleotide
  Full comp hsa-miR-5010-5p MIMAT0021043
aattttgctctgccatccccct

SEQ ID NO: 3343 - DNA, 20 bp, Artificial Sequence
  Synthetic oligonucleotide
  Full comp hsa-miR-6125 MIMAT0024598
tccgccgctccgccttccgc

SEQ ID NO: 3344 - DNA, 23 bp, Artificial Sequence
  Synthetic oligonucleotide
  Full comp hsa-miR-6835-3p MIMAT0027571
ctgggagacagaaaagtgctttt

SEQ ID NO: 3345 - DNA, 22 bp, Artificial Sequence
  Synthetic oligonucleotide
  Full comp hsa-miR-4424 MIMAT0018939
tagtccattttgagttaactct

SEQ ID NO: 3346 - DNA, 23 bp, Artificial Sequence
  Synthetic oligonucleotide
  Full comp hsa-miR-7703 MIMAT0030018
cctgggagaaggccagagtgcaa

SEQ ID NO: 3347 - DNA, 25 bp, Artificial Sequence
  Synthetic oligonucleotide
  Full comp hsa-miR-652-5p MIMAT0022709
tgaatggcaccctctcctagggttg

SEQ ID NO: 3348 - DNA, 18 bp, Artificial Sequence
  Synthetic oligonucleotide
  Full comp hsa-miR-4272 MIMAT0016902
acaatcactagttgaatg

SEQ ID NO: 3349 - DNA, 22 bp, Artificial Sequence
  Synthetic oligonucleotide
  Full comp hsa-miR-3691-3p MIMAT0019224
gagaggatgacgcagacttggt

SEQ ID NO: 3350 - DNA, 22 bp, Artificial Sequence
  Synthetic oligonucleotide
  Full comp hsa-miR-3183 MIMAT0015063
tccgagcgactccgagagaggc

SEQ ID NO: 3351 - DNA, 23 bp, Artificial Sequence
  Synthetic oligonucleotide
  Full comp hsa-miR-6863 MIMAT0027627
cactcaatccttcaccacgtcta

SEQ ID NO: 3352 - DNA, 21 bp, Artificial Sequence
  Synthetic oligonucleotide
  Full comp hsa-miR-3942-3p MIMAT0019230
atgtaatactgttatctgaaa

SEQ ID NO: 3353 - DNA, 26 bp, Artificial Sequence
  Synthetic oligonucleotide
  Full comp hsa-miR-1244 MIMAT0005896
aaccatctcatacaaaccaactactt

SEQ ID NO: 3354 - DNA, 25 bp, Artificial Sequence
  Synthetic oligonucleotide
  Full comp hsa-miR-6812-5p MIMAT0027524
gctgctcctccccatctcaccccat

SEQ ID NO: 3355 - DNA, 22 bp, Artificial Sequence
  Synthetic oligonucleotide
  Full comp hsa-miR-556-3p MIMAT0004793
aaagatgagctaatggtaatat

SEQ ID NO: 3356 - DNA, 22 bp, Artificial Sequence
  Synthetic oligonucleotide
  Full comp hsa-miR-373-5p MIMAT0000725
ggaaagcgcccccattttgagt

SEQ ID NO: 3357 - DNA, 19 bp, Artificial Sequence
  Synthetic oligonucleotide
  Full comp hsa-miR-564 MIMAT0003228
gcctgctgacaccgtgcct

SEQ ID NO: 3358 - DNA, 22 bp, Artificial Sequence
  Synthetic oligonucleotide
  Full comp hsa-miR-548o-5p MIMAT0022738
ggcaaaaaccgcaattactttt

SEQ ID NO: 3359 - DNA, 22 bp, Artificial Sequence
  Synthetic oligonucleotide
  Full comp hsa-miR-367-3p MIMAT0000719
tcaccattgctaaagtgcaatt

SEQ ID NO: 3360 - DNA, 22 bp, Artificial Sequence
  Synthetic oligonucleotide
  Full comp hsa-miR-601 MIMAT0003269
ctcctccaacaatcctagacca

SEQ ID NO: 3361 - DNA, 19 bp, Artificial Sequence
  Synthetic oligonucleotide
  Full comp hsa-miR-4327 MIMAT0016889
ccagtcccccatgcaagcc

SEQ ID NO: 3362 - DNA, 26 bp, Artificial Sequence
  Synthetic oligonucleotide
  Full comp hsa-miR-4665-3p MIMAT0019740
ggcgggggctacgcgccgcggccgag

SEQ ID NO: 3363 - DNA, 21 bp, Artificial Sequence
  Synthetic oligonucleotide
  Full comp hsa-miR-4437 MIMAT0018953
aacctttgtaccctgagccca

SEQ ID NO: 3364 - DNA, 22 bp, Artificial Sequence
  Synthetic oligonucleotide
  Full comp hsa-miR-548aq-3p MIMAT0022264
gcaaaagtaattgcagtttttg

SEQ ID NO: 3365 - DNA, 22 bp, Artificial Sequence
  Synthetic oligonucleotide
  Full comp hsa-miR-5191 MIMAT0021122
agcacttcattcttcctatcct

SEQ ID NO: 3366 - DNA, 22 bp, Artificial Sequence
  Synthetic oligonucleotide
  Full comp hsa-miR-4738-3p MIMAT0019867
tcctccaggcgctccagtttca

SEQ ID NO: 3367 - DNA, 22 bp, Artificial Sequence
  Synthetic oligonucleotide
  Full comp hsa-miR-876-3p MIMAT0004925
tgaattactttgtaaaccacca

SEQ ID NO: 3368 - DNA, 22 bp, Artificial Sequence
  Synthetic oligonucleotide
  Full comp hsa-miR-6792-3p MIMAT0027485
atgagcaggggctgtggaggag

SEQ ID NO: 3369 - DNA, 22 bp, Artificial Sequence
  Synthetic oligonucleotide
  Full comp hsa-miR-3922-3p MIMAT0018197
aaagagtcaagtcaaggccaga

SEQ ID NO: 3370 - DNA, 23 bp, Artificial Sequence
  Synthetic oligonucleotide
  Full comp hsa-miR-423-5p MIMAT0004748
aaagtctcgctctctgcccctca

SEQ ID NO: 3371 - DNA, 26 bp, Artificial Sequence
  Synthetic oligonucleotide
  Full comp hsa-miR-1272 MIMAT0005925
tttcagaatttgctgccatcatcatc

SEQ ID NO: 3372 - DNA, 18 bp, Artificial Sequence
  Synthetic oligonucleotide
  Full comp hsa-miR-4434 MIMAT0018950
ttctactttacttctcct

SEQ ID NO: 3373 - DNA, 22 bp, Artificial Sequence
  Synthetic oligonucleotide
  Full comp hsa-miR-200a-3p MIMAT0000682
acatcgttaccagacagtgtta

SEQ ID NO: 3374 - DNA, 19 bp, Artificial Sequence
  Synthetic oligonucleotide
  Full comp hsa-miR-6870-5p MIMAT0027640
tcaacccccatctccccca

SEQ ID NO: 3375 - DNA, 21 bp, Artificial Sequence
  Synthetic oligonucleotide
  Full comp hsa-miR-509-5p MIMAT0004779
tgattgccactgtctgcagta

SEQ ID NO: 3376 - DNA, 20 bp, Artificial Sequence
  Synthetic oligonucleotide
  Full comp hsa-miR-4313 MIMAT0016865
gggtttggggccagggggct

SEQ ID NO: 3377 - DNA, 22 bp, Artificial Sequence
  Synthetic oligonucleotide
  Full comp hsa-miR-944 MIMAT0004987
ctcatccgatgtacaataattt

SEQ ID NO: 3378 - DNA, 23 bp, Artificial Sequence
  Synthetic oligonucleotide
  Full comp hsa-miR-3184-3p MIMAT0022731
tgaggggcagagagcgagacttt

SEQ ID NO: 3379 - DNA, 22 bp, Artificial Sequence
  Synthetic oligonucleotide
  Full comp hsa-miR-548e-3p MIMAT0005874
tgcaaaagtagtctcagttttt

SEQ ID NO: 3380 - DNA, 24 bp, Artificial Sequence
  Synthetic oligonucleotide
  Full comp hsa-miR-29b-1-5p MIMAT0004514
tctaaaccaccatatgaaaccagc

SEQ ID NO: 3381 - DNA, 22 bp, Artificial Sequence
  Synthetic oligonucleotide
  Full comp hsa-miR-1265 MIMAT0005918
aacaacacttgaccacatcctg

SEQ ID NO: 3382 - DNA, 22 bp, Artificial Sequence
  Synthetic oligonucleotide
  Full comp hsa-miR-548ac MIMAT0018938
caaaagtaattgccggtttttg

SEQ ID NO: 3383 - DNA, 22 bp, Artificial Sequence
  Synthetic oligonucleotide
  Full comp hsa-miR-1343-3p MIMAT0019776
gcgagagtgcgggccccaggag

SEQ ID NO: 3384 - DNA, 22 bp, Artificial Sequence
  Synthetic oligonucleotide
  Full comp hsa-miR-515-3p MIMAT0002827
aacgctccaaaagaaggcactc

SEQ ID NO: 3385 - DNA, 21 bp, Artificial Sequence
  Synthetic oligonucleotide
  Full comp hsa-miR-5694 MIMAT0022487
ctgagacagtcccatgatctg

SEQ ID NO: 3386 - DNA, 23 bp, Artificial Sequence
  Synthetic oligonucleotide
  Full comp hsa-miR-3166 MIMAT0015040
taggccagtaggcattgtctgcg

SEQ ID NO: 3387 - DNA, 22 bp, Artificial Sequence
  Synthetic oligonucleotide
  Full comp hsa-miR-203b-5p MIMAT0019813
tgtgaaatgtttaggaccacta

SEQ ID NO: 3388 - DNA, 21 bp, Artificial Sequence
  Synthetic oligonucleotide
  Full comp hsa-miR-410-3p MIMAT0002171
acaggccatctgtgttatatt

SEQ ID NO: 3389 - DNA, 17 bp, Artificial Sequence
  Synthetic oligonucleotide
  Full comp hsa-miR-4317 MIMAT0016872
aaactccctggcaatgt

SEQ ID NO: 3390 - DNA, 22 bp, Artificial Sequence
  Synthetic oligonucleotide
  Full comp hsa-miR-3164 MIMAT0015038
cgccatttcccttaaagtcaca

SEQ ID NO: 3391 - DNA, 22 bp, Artificial Sequence
  Synthetic oligonucleotide
  Full comp hsa-miR-365b-3p MIMAT0022834
ataaggatttttaggggcatta

SEQ ID NO: 3392 - DNA, 22 bp, Artificial Sequence
  Synthetic oligonucleotide
  Full comp hsa-miR-216a-5p MIMAT0000273
tcacagttgccagctgagatta

SEQ ID NO: 3393 - DNA, 23 bp, Artificial Sequence
  Synthetic oligonucleotide
  Full comp hsa-miR-514a-5p MIMAT0022702
catgattgtcactctccagagta

SEQ ID NO: 3394 - DNA, 20 bp, Artificial Sequence
  Synthetic oligonucleotide
  Full comp hsa-miR-3190-5p MIMAT0015073
tggggacgtagctggccaga

SEQ ID NO: 3395 - DNA, 24 bp, Artificial Sequence
  Synthetic oligonucleotide
  Full comp hsa-miR-6795-5p MIMAT0027490
acagcctctcatcctgtcccccca

SEQ ID NO: 3396 - DNA, 22 bp, Artificial Sequence
  Synthetic oligonucleotide
  Full comp hsa-miR-4467 MIMAT0018994
aagcccataactaccgccgcca

SEQ ID NO: 3397 - DNA, 23 bp, Artificial Sequence
  Synthetic oligonucleotide
  Full comp hsa-miR-6734-5p MIMAT0027369
tctccacctcattctcccctcaa

SEQ ID NO: 3398 - DNA, 23 bp, Artificial Sequence
  Synthetic oligonucleotide
  Full comp hsa-miR-155-5p MIMAT0000646
acccctatcacgattagcattaa

SEQ ID NO: 3399 - DNA, 27 bp, Artificial Sequence
  Synthetic oligonucleotide
  Full comp hsa-miR-1183 MIMAT0005828
tgcccactctcaccatcacctacagtg

SEQ ID NO: 3400 - DNA, 20 bp, Artificial Sequence
  Synthetic oligonucleotide
  Full comp hsa-miR-548x-3p MIMAT0015081
gaaagtaattgcagttttta

SEQ ID NO: 3401 - DNA, 21 bp, Artificial Sequence
  Synthetic oligonucleotide
  Full comp hsa-miR-4694-3p MIMAT0019787
aggtgttatcctgtccatttg

SEQ ID NO: 3402 - DNA, 22 bp, Artificial Sequence
  Synthetic oligonucleotide
  Full comp hsa-miR-3144-5p MIMAT0015014
ctatatatctctttggtcccct

SEQ ID NO: 3403 - DNA, 22 bp, Artificial Sequence
  Synthetic oligonucleotide
  Full comp hsa-let-7d-3p MIMAT0004484
agaaaggcagcaggtcgtatag

SEQ ID NO: 3404 - DNA, 23 bp, Artificial Sequence
  Synthetic oligonucleotide
  Full comp hsa-miR-520g-5p MIMAT0026611
aaacagaaagtgcttcctctaga

SEQ ID NO: 3405 - DNA, 21 bp, Artificial Sequence
  Synthetic oligonucleotide
  Full comp hsa-miR-7854-3p MIMAT0030429
ttcccatctgcggtcacctca

SEQ ID NO: 3406 - DNA, 18 bp, Artificial Sequence
  Synthetic oligonucleotide
  Full comp hsa-miR-3652 MIMAT0018072
tcctcacacctccagccg

SEQ ID NO: 3407 - DNA, 17 bp, Artificial Sequence
  Synthetic oligonucleotide
  Full comp hsa-miR-1275 MIMAT0005929
gacagcctctcccccac

SEQ ID NO: 3408 - DNA, 22 bp, Artificial Sequence
  Synthetic oligonucleotide
  Full comp hsa-miR-500a-3p MIMAT0002871
cagaatccttgcccaggtgcat

SEQ ID NO: 3409 - DNA, 21 bp, Artificial Sequence
  Synthetic oligonucleotide
  Full comp hsa-miR-552-3p MIMAT0003215
ttgtctaaccagtcacctgtt

SEQ ID NO: 3410 - DNA, 22 bp, Artificial Sequence
  Synthetic oligonucleotide
  Full comp hsa-miR-22-3p MIMAT0000077
acagttcttcaactggcagctt

SEQ ID NO: 3411 - DNA, 22 bp, Artificial Sequence
  Synthetic oligonucleotide
  Full comp hsa-miR-219a-2-3p MIMAT0004675
acagatgtccagccacaattct

SEQ ID NO: 3412 - DNA, 22 bp, Artificial Sequence
  Synthetic oligonucleotide
  Full comp hsa-miR-570-5p MIMAT0022707
gggaaaaactgcaattaccttt

SEQ ID NO: 3413 - DNA, 21 bp, Artificial Sequence
  Synthetic oligonucleotide
  Full comp hsa-miR-411-5p MIMAT0003329
cgtacgctatacggtctacta

SEQ ID NO: 3414 - DNA, 23 bp, Artificial Sequence
  Synthetic oligonucleotide
  Full comp hsa-miR-1288-5p MIMAT0026743
ggtgagttacagtcctgatctgc

SEQ ID NO: 3415 - DNA, 23 bp, Artificial Sequence
  Synthetic oligonucleotide
  Full comp hsa-miR-6884-3p MIMAT0027669
aggggagacggaaaggtgatggg

SEQ ID NO: 3416 - DNA, 22 bp, Artificial Sequence
  Synthetic oligonucleotide
  Full comp hsa-miR-891b MIMAT0004913
tcaatgactcaggtaagttgca

SEQ ID NO: 3417 - DNA, 21 bp, Artificial Sequence
  Synthetic oligonucleotide
  Full comp hsa-miR-3606-5p MIMAT0017983
aattaaaatagccttcactaa

SEQ ID NO: 3418 - DNA, 24 bp, Artificial Sequence
  Synthetic oligonucleotide
  Full comp hsa-miR-3147 MIMAT0015019
tcacaccctcctcactgcccaacc

SEQ ID NO: 3419 - DNA, 24 bp, Artificial Sequence
  Synthetic oligonucleotide
  Full comp hsa-miR-1247-3p MIMAT0022721
gctccagtctcgacgttcccgggg

SEQ ID NO: 3420 - DNA, 22 bp, Artificial Sequence
  Synthetic oligonucleotide
  Full comp hsa-miR-5700 MIMAT0022493
ccttcaataatttaatgcatta

SEQ ID NO: 3421 - DNA, 23 bp, Artificial Sequence
  Synthetic oligonucleotide
  Full comp hsa-miR-4653-3p MIMAT0019719
tctccaagcaacccttaactcca

SEQ ID NO: 3422 - DNA, 22 bp, Artificial Sequence
  Synthetic oligonucleotide
  Full comp hsa-miR-1252-3p MIMAT0026744
aaaaggaaattaagctcatttg

SEQ ID NO: 3423 - DNA, 23 bp, Artificial Sequence
  Synthetic oligonucleotide
  Full comp hsa-miR-5090 MIMAT0021082
caccctacaccaatctgccccgg

SEQ ID NO: 3424 - DNA, 22 bp, Artificial Sequence
  Synthetic oligonucleotide
  Full comp hsa-miR-365a-3p MIMAT0000710
ataaggatttttaggggcatta

SEQ ID NO: 3425 - DNA, 20 bp, Artificial Sequence
  Synthetic oligonucleotide
  Full comp hsa-miR-7154-3p MIMAT0028219
atcccacaacttgtcctcct

SEQ ID NO: 3426 - DNA, 22 bp, Artificial Sequence
  Synthetic oligonucleotide
  Full comp hsa-miR-3179 MIMAT0015056
acgtttaaatttcaccccttct

SEQ ID NO: 3427 - DNA, 21 bp, Artificial Sequence
  Synthetic oligonucleotide
  Full comp hsa-miR-6792-5p MIMAT0027484
tcacccagagcccctgcttac

SEQ ID NO: 3428 - DNA, 22 bp, Artificial Sequence
  Synthetic oligonucleotide
  Full comp hsa-miR-3152-5p MIMAT0019207
cttgtgttagaacagaggcaat

SEQ ID NO: 3429 - DNA, 22 bp, Artificial Sequence
  Synthetic oligonucleotide
  Full comp hsa-miR-744-3p MIMAT0004946
aggttgaggttagtggcaacag

SEQ ID NO: 3430 - DNA, 22 bp, Artificial Sequence
  Synthetic oligonucleotide
  Full comp hsa-miR-138-2-3p MIMAT0004596
aaccctggtgtcgtgaaatagc

SEQ ID NO: 3431 - DNA, 23 bp, Artificial Sequence
  Synthetic oligonucleotide
  Full comp hsa-miR-8084 MIMAT0031011
tactgattttttacttagtattc

SEQ ID NO: 3432 - DNA, 22 bp, Artificial Sequence
  Synthetic oligonucleotide
  Full comp hsa-miR-5707 MIMAT0022501
gccttgtacagcattcaaacgt

SEQ ID NO: 3433 - DNA, 23 bp, Artificial Sequence
  Synthetic oligonucleotide
  Full comp hsa-miR-8081 MIMAT0031008
cattcagaaaggcacgactcaag

SEQ ID NO: 3434 - DNA, 22 bp, Artificial Sequence
  Synthetic oligonucleotide
  Full comp hsa-miR-502-3p MIMAT0004775
tgaatccttgcccaggtgcatt

SEQ ID NO: 3435 - DNA, 23 bp, Artificial Sequence
  Synthetic oligonucleotide
  Full comp hsa-miR-3937 MIMAT0018352
cccccattgctacagccgcctgt

SEQ ID NO: 3436 - DNA, 21 bp, Artificial Sequence
  Synthetic oligonucleotide
  Full comp hsa-miR-3064-5p MIMAT0019864
ttgcacaccacaacagccaga

SEQ ID NO: 3437 - DNA, 22 bp, Artificial Sequence
  Synthetic oligonucleotide
  Full comp hsa-miR-509-3-5p MIMAT0004975
catgattgccacgtctgcagta

SEQ ID NO: 3438 - DNA, 22 bp, Artificial Sequence
  Synthetic oligonucleotide
  Full comp hsa-miR-889-5p MIMAT0026719
gaccatactacggacagccatt

SEQ ID NO: 3439 - DNA, 21 bp, Artificial Sequence
  Synthetic oligonucleotide
  Full comp hsa-miR-6745 MIMAT0027391
aaccagaccttcttccaccca

SEQ ID NO: 3440 - DNA, 21 bp, Artificial Sequence
  Synthetic oligonucleotide
  Full comp hsa-miR-3918 MIMAT0018192
agtctccatctgcggccctgt

SEQ ID NO: 3441 - DNA, 22 bp, Artificial Sequence
  Synthetic oligonucleotide
  Full comp hsa-miR-4755-5p MIMAT0019895
aaagccaggctctgaagggaaa

SEQ ID NO: 3442 - DNA, 22 bp, Artificial Sequence
  Synthetic oligonucleotide
  Full comp hsa-miR-3619-3p MIMAT0019219
ccacagcaggcaggatggtccc

SEQ ID NO: 3443 - DNA, 18 bp, Artificial Sequence
  Synthetic oligonucleotide
  Full comp hsa-miR-500b-5p MIMAT0016925
acccaggtagcaaggatt

SEQ ID NO: 3444 - DNA, 22 bp, Artificial Sequence
  Synthetic oligonucleotide
  Full comp hsa-miR-192-3p MIMAT0004543
ctgtgacctatggaattggcag

SEQ ID NO: 3445 - DNA, 17 bp, Artificial Sequence
  Synthetic oligonucleotide
  Full comp hsa-miR-4296 MIMAT0016845
tgagcctgagcccacat

SEQ ID NO: 3446 - DNA, 22 bp, Artificial Sequence
  Synthetic oligonucleotide
  Full comp hsa-miR-517a-3p MIMAT0002852
acactctaaagggatgcacgat

SEQ ID NO: 3447 - DNA, 21 bp, Artificial Sequence
  Synthetic oligonucleotide
  Full comp hsa-miR-873-5p MIMAT0004953
aggagactcacaagttcctgc

SEQ ID NO: 3448 - DNA, 22 bp, Artificial Sequence
  Synthetic oligonucleotide
  Full comp hsa-miR-1233-5p MIMAT0022943
tgccgtgccctggcctcccact

SEQ ID NO: 3449 - DNA, 22 bp, Artificial Sequence
  Synthetic oligonucleotide
  Full comp hsa-miR-1266-3p MIMAT0026742
tccctcagggcatagaacaggg

SEQ ID NO: 3450 - DNA, 22 bp, Artificial Sequence
  Synthetic oligonucleotide
  Full comp hsa-miR-2114-5p MIMAT0011156
gaccgcttcaaggaagggacta

SEQ ID NO: 3451 - DNA, 22 bp, Artificial Sequence
  Synthetic oligonucleotide
  Full comp hsa-miR-222-5p MIMAT0004569
aggatctacactggctactgag

SEQ ID NO: 3452 - DNA, 22 bp, Artificial Sequence
  Synthetic oligonucleotide
  Full comp hsa-miR-542-3p MIMAT0003389
tttcagttatcaatctgtcaca

SEQ ID NO: 3453 - DNA, 22 bp, Artificial Sequence
  Synthetic oligonucleotide
  Full comp hsa-miR-4768-5p MIMAT0019920
atccatgggatccagagagaat

SEQ ID NO: 3454 - DNA, 22 bp, Artificial Sequence
  Synthetic oligonucleotide
  Full comp hsa-miR-589-5p MIMAT0004799
ctcagagcagacgtggttctca

SEQ ID NO: 3455 - DNA, 22 bp, Artificial Sequence
  Synthetic oligonucleotide
  Full comp hsa-miR-16-1-3p MIMAT0004489
tcagcagcacagttaatactgg

SEQ ID NO: 3456 - DNA, 22 bp, Artificial Sequence
  Synthetic oligonucleotide
  Full comp hsa-miR-181c-3p MIMAT0004559
gtccactcaacggtcgatggtt

SEQ ID NO: 3457 - DNA, 22 bp, Artificial Sequence
  Synthetic oligonucleotide
  Full comp hsa-miR-517b-3p MIMAT0002857
acactctaaagggatgcacgat

SEQ ID NO: 3458 - DNA, 22 bp, Artificial Sequence
  Synthetic oligonucleotide
  Full comp hsa-miR-548o-3p MIMAT0005919
gcaaaagtaactgcagttttgg

SEQ ID NO: 3459 - DNA, 21 bp, Artificial Sequence
  Synthetic oligonucleotide
  Full comp hsa-miR-624-3p MIMAT0004807
aggtaataccaataccttgtg

SEQ ID NO: 3460 - DNA, 24 bp, Artificial Sequence
  Synthetic oligonucleotide
  Full comp hsa-miR-6766-5p MIMAT0027432
ctcaataagatctgctcccacccg

SEQ ID NO: 3461 - DNA, 22 bp, Artificial Sequence
  Synthetic oligonucleotide
  Full comp hsa-miR-4777-3p MIMAT0019935
tacagcattctagatgaggtat

SEQ ID NO: 3462 - DNA, 22 bp, Artificial Sequence
  Synthetic oligonucleotide
  Full comp hsa-miR-181a-2-3p MIMAT0004558
ggtacagtcaacggtcagtggt

SEQ ID NO: 3463 - DNA, 22 bp, Artificial Sequence
  Synthetic oligonucleotide
  Full comp hsa-miR-6814-5p MIMAT0027528
tggcagcatctcacccttggga

SEQ ID NO: 3464 - DNA, 21 bp, Artificial Sequence
  Synthetic oligonucleotide
  Full comp hsa-miR-4732-3p MIMAT0019856
cagaacaggacaggtcagggc

SEQ ID NO: 3465 - DNA, 22 bp, Artificial Sequence
  Synthetic oligonucleotide
  Full comp hsa-miR-335-3p MIMAT0004703
ggtcaggagcaataatgaaaaa

SEQ ID NO: 3466 - DNA, 22 bp, Artificial Sequence
  Synthetic oligonucleotide
  Full comp hsa-miR-5581-5p MIMAT0022275
tctccatttctcctggaaggct

SEQ ID NO: 3467 - DNA, 22 bp, Artificial Sequence
  Synthetic oligonucleotide
  Full comp hsa-miR-27a-5p MIMAT0004501
tgctcacaagcagctaagccct

SEQ ID NO: 3468 - DNA, 22 bp, Artificial Sequence
  Synthetic oligonucleotide
  Full comp hsa-miR-875-5p MIMAT0004922
cacctgataaaactgaggtata

SEQ ID NO: 3469 - DNA, 22 bp, Artificial Sequence
  Synthetic oligonucleotide
  Full comp hsa-miR-942-3p MIMAT0026734
acttctctgtttcggccatgtg

SEQ ID NO: 3470 - DNA, 21 bp, Artificial Sequence
  Synthetic oligonucleotide
  Full comp hsa-miR-4269 MIMAT0016897
gccagggctgtctgtgcctgc

SEQ ID NO: 3471 - DNA, 21 bp, Artificial Sequence
  Synthetic oligonucleotide
  Full comp hsa-miR-376a-2-5p MIMAT0022928
accatagaaggaaaatctacc

SEQ ID NO: 3472 - DNA, 21 bp, Artificial Sequence
  Synthetic oligonucleotide
  Full comp hsa-miR-650 MIMAT0003320
gtcctgagagcgctgcctcct

SEQ ID NO: 3473 - DNA, 21 bp, Artificial Sequence
  Synthetic oligonucleotide
  Full comp hsa-miR-1245a MIMAT0005897
atgtaggcctttagatcactt

SEQ ID NO: 3474 - DNA, 22 bp, Artificial Sequence
  Synthetic oligonucleotide
  Full comp hsa-miR-6884-5p MIMAT0027668
caacatcaccttctcagcctct

SEQ ID NO: 3475 - DNA, 23 bp, Artificial Sequence
  Synthetic oligonucleotide
  Full comp hsa-miR-1184 MIMAT0005829
ggaagccatcaagtcgctgcagg

SEQ ID NO: 3476 - DNA, 18 bp, Artificial Sequence
  Synthetic oligonucleotide
  Full comp hsa-miR-4256 MIMAT0016877
accttcatcaggtcagat

SEQ ID NO: 3477 - DNA, 22 bp, Artificial Sequence
  Synthetic oligonucleotide
  Full comp hsa-miR-517-5p MIMAT0002851
agacagtgcttccatctagagg

SEQ ID NO: 3478 - DNA, 21 bp, Artificial Sequence
  Synthetic oligonucleotide
  Full comp hsa-miR-4480 MIMAT0019014
taaagtaacttccacttggct

SEQ ID NO: 3479 - DNA, 21 bp, Artificial Sequence
  Synthetic oligonucleotide
  Full comp hsa-miR-4635 MIMAT0019692
ttgcgggttctgacttcaaga

SEQ ID NO: 3480 - DNA, 17 bp, Artificial Sequence
  Synthetic oligonucleotide
  Full comp hsa-miR-4531 MIMAT0019070
tcagaagccttctccat

SEQ ID NO: 3481 - DNA, 21 bp, Artificial Sequence
  Synthetic oligonucleotide
  Full comp hsa-miR-6892-3p MIMAT0027685
ctgcaaggggtgggagaggga

SEQ ID NO: 3482 - DNA, 21 bp, Artificial Sequence
  Synthetic oligonucleotide
  Full comp hsa-miR-4797-5p MIMAT0019972
ttcagtaagtggcactctgtc

SEQ ID NO: 3483 - DNA, 23 bp, Artificial Sequence
  Synthetic oligonucleotide
  Full comp hsa-miR-18b-5p MIMAT0001412
ctaactgcactagatgcacctta

SEQ ID NO: 3484 - DNA, 23 bp, Artificial Sequence
  Synthetic oligonucleotide
  Full comp hsa-miR-18a-5p MIMAT0000072
ctatctgcactagatgcacctta

SEQ ID NO: 3485 - DNA, 22 bp, Artificial Sequence
  Synthetic oligonucleotide
  Full comp hsa-miR-4778-5p MIMAT0019936
cctcttcttcctttacagaatt

SEQ ID NO: 3486 - DNA, 23 bp, Artificial Sequence
  Synthetic oligonucleotide
  Full comp hsa-miR-3943 MIMAT0018359
cgccaagtgaagcctgggggcta

SEQ ID NO: 3487 - DNA, 22 bp, Artificial Sequence
  Synthetic oligonucleotide
  Full comp hsa-miR-6773-3p MIMAT0027447
ctatgggcagagaagtgacagt

SEQ ID NO: 3488 - DNA, 22 bp, Artificial Sequence
  Synthetic oligonucleotide
  Full comp hsa-miR-6507-3p MIMAT0025471
gggaaaaataggaaggactttg

SEQ ID NO: 3489 - DNA, 22 bp, Artificial Sequence
  Synthetic oligonucleotide
  Full comp hsa-miR-7-1-3p MIMAT0004553
tatggcagactgtgatttgttg

SEQ ID NO: 3490 - DNA, 19 bp, Artificial Sequence
  Synthetic oligonucleotide
  Full comp hsa-miR-378j MIMAT0024612
ttctggctccaaatccagt

SEQ ID NO: 3491 - DNA, 22 bp, Artificial Sequence
  Synthetic oligonucleotide
  Full comp hsa-miR-6839-5p MIMAT0027580
tgggtcgtctcttcaatccaga

SEQ ID NO: 3492 - DNA, 22 bp, Artificial Sequence
  Synthetic oligonucleotide
  Full comp hsa-miR-6788-3p MIMAT0027477
ctgcagggagggaagtggcgaa

SEQ ID NO: 3493 - DNA, 21 bp, Artificial Sequence
  Synthetic oligonucleotide
  Full comp hsa-miR-337-5p MIMAT0004695
aactcctgtatgaagccgttc

SEQ ID NO: 3494 - DNA, 19 bp, Artificial Sequence
  Synthetic oligonucleotide
  Full comp hsa-miR-4800-3p MIMAT0019979
gtggacagacggacggatg

SEQ ID NO: 3495 - DNA, 22 bp, Artificial Sequence
  Synthetic oligonucleotide
  Full comp hsa-miR-374a-5p MIMAT0000727
cacttatcaggttgtattataa

SEQ ID NO: 3496 - DNA, 21 bp, Artificial Sequence
  Synthetic oligonucleotide
  Full comp hsa-miR-6513-3p MIMAT0025483
ctagggacagatgacacttga

SEQ ID NO: 3497 - DNA, 22 bp, Artificial Sequence
  Synthetic oligonucleotide
  Full comp hsa-miR-4524a-5p MIMAT0019062
tgagacaggttcatgctgctat

SEQ ID NO: 3498 - DNA, 22 bp, Artificial Sequence
  Synthetic oligonucleotide
  Full comp hsa-miR-28-3p MIMAT0004502
tccaggagctcacaatctagtg

SEQ ID NO: 3499 - DNA, 23 bp, Artificial Sequence
  Synthetic oligonucleotide
  Full comp hsa-miR-4640-5p MIMAT0019699
cccaccagctgctccctggccca

SEQ ID NO: 3500 - DNA, 21 bp, Artificial Sequence
  Synthetic oligonucleotide
  Full comp hsa-miR-3611 MIMAT0017988
taagaatttctttcttcacaa

SEQ ID NO: 3501 - DNA, 22 bp, Artificial Sequence
  Synthetic oligonucleotide
  Full comp hsa-miR-8070 MIMAT0030997
tggagtcagccgtcaatcacat

SEQ ID NO: 3502 - DNA, 23 bp, Artificial Sequence
  Synthetic oligonucleotide
  Full comp hsa-miR-10a-5p MIMAT0000253
cacaaattcggatctacagggta

SEQ ID NO: 3503 - DNA, 22 bp, Artificial Sequence
  Synthetic oligonucleotide
  Full comp hsa-miR-29b-2-5p MIMAT0004515
ctaagccaccatgtgaaaccag

SEQ ID NO: 3504 - DNA, 22 bp, Artificial Sequence
  Synthetic oligonucleotide
  Full comp hsa-miR-4727-3p MIMAT0019848
gaatctgccagcttcccactat

SEQ ID NO: 3505 - DNA, 22 bp, Artificial Sequence
  Synthetic oligonucleotide
  Full comp hsa-miR-561-3p MIMAT0003225
acttcaaggatcttaaactttg

SEQ ID NO: 3506 - DNA, 22 bp, Artificial Sequence
  Synthetic oligonucleotide
  Full comp hsa-miR-514b-5p MIMAT0015087
atgattgcctccctcttgagaa

SEQ ID NO: 3507 - DNA, 25 bp, Artificial Sequence
  Synthetic oligonucleotide
  Full comp hsa-miR-638 MIMAT0003308
aggccgccacccgcccgcgatccct

SEQ ID NO: 3508 - DNA, 22 bp, Artificial Sequence
  Synthetic oligonucleotide
  Full comp hsa-miR-6516-5p MIMAT0030417
tgctcacacctgttactgcaaa

SEQ ID NO: 3509 - DNA, 20 bp, Artificial Sequence
  Synthetic oligonucleotide
  Full comp hsa-miR-3607-3p MIMAT0017985
catcagaaagcgtttacagt

SEQ ID NO: 3510 - DNA, 22 bp, Artificial Sequence
  Synthetic oligonucleotide
  Full comp hsa-miR-3146 MIMAT0015018
ccattctttctatcctagcatg

SEQ ID NO: 3511 - DNA, 22 bp, Artificial Sequence
  Synthetic oligonucleotide
  Full comp hsa-miR-4707-3p MIMAT0019808
agaacctcggctggggcgggct

SEQ ID NO: 3512 - DNA, 22 bp, Artificial Sequence
  Synthetic oligonucleotide
  Full comp hsa-miR-6860 MIMAT0027622
actcaccacagccctgcccagt

SEQ ID NO: 3513 - DNA, 16 bp, Artificial Sequence
  Synthetic oligonucleotide
  Full comp hsa-miR-4267 MIMAT0016893
gtgccaccgagctgga

SEQ ID NO: 3514 - DNA, 18 bp, Artificial Sequence
  Synthetic oligonucleotide
  Full comp hsa-miR-4325 MIMAT0016887
tcactgagacaagtgcaa

SEQ ID NO: 3515 - DNA, 22 bp, Artificial Sequence
  Synthetic oligonucleotide
  Full comp hsa-miR-510-5p MIMAT0002882
gtgattgccactctcctgagta

SEQ ID NO: 3516 - DNA, 21 bp, Artificial Sequence
  Synthetic oligonucleotide
  Full comp hsa-miR-5587-3p MIMAT0022290
gatgatcacactgcccggggc

SEQ ID NO: 3517 - DNA, 23 bp, Artificial Sequence
  Synthetic oligonucleotide
  Full comp hsa-miR-4726-5p MIMAT0019845
ccactccaggctcctctggccct

SEQ ID NO: 3518 - DNA, 22 bp, Artificial Sequence
  Synthetic oligonucleotide
  Full comp hsa-miR-490-3p MIMAT0002806
cagcatggagtcctccaggttg

SEQ ID NO: 3519 - DNA, 21 bp, Artificial Sequence
  Synthetic oligonucleotide
  Full comp hsa-miR-647 MIMAT0003317
gaaggaagtgagtgcagccac

SEQ ID NO: 3520 - DNA, 22 bp, Artificial Sequence
  Synthetic oligonucleotide
  Full comp hsa-miR-4726-3p MIMAT0019846
tgcggccagagggaacctgggt

SEQ ID NO: 3521 - DNA, 21 bp, Artificial Sequence
  Synthetic oligonucleotide
  Full comp hsa-miR-559 MIMAT0003223
ttttggtgcatatttacttta

SEQ ID NO: 3522 - DNA, 21 bp, Artificial Sequence
  Synthetic oligonucleotide
  Full comp hsa-miR-101-3p MIMAT0000099
ttcagttatcacagtactgta

SEQ ID NO: 3523 - DNA, 23 bp, Artificial Sequence
  Synthetic oligonucleotide
  Full comp hsa-miR-4644 MIMAT0019704
cttctgtctcttttctctctcca

SEQ ID NO: 3524 - DNA, 20 bp, Artificial Sequence
  Synthetic oligonucleotide
  Full comp hsa-miR-6716-5p MIMAT0025844
ggcccttacccccattccca

SEQ ID NO: 3525 - DNA, 22 bp, Artificial Sequence
  Synthetic oligonucleotide
  Full comp hsa-miR-301b-5p MIMAT0032026
agtagtgcaacctcgtcagagc

SEQ ID NO: 3526 - DNA, 23 bp, Artificial Sequence
  Synthetic oligonucleotide
  Full comp hsa-miR-3134 MIMAT0015000
aatatgtagtcttttatccatca

SEQ ID NO: 3527 - DNA, 22 bp, Artificial Sequence
  Synthetic oligonucleotide
  Full comp hsa-miR-127-5p MIMAT0004604
atcagagccctctgagcttcag

SEQ ID NO: 3528 - DNA, 24 bp, Artificial Sequence
  Synthetic oligonucleotide
  Full comp hsa-miR-4663 MIMAT0019735
actgcacgtccatggagctcagct

SEQ ID NO: 3529 - DNA, 22 bp, Artificial Sequence
  Synthetic oligonucleotide
  Full comp hsa-miR-193b-3p MIMAT0002819
agcgggactttgagggccagtt

SEQ ID NO: 3530 - DNA, 24 bp, Artificial Sequence
  Synthetic oligonucleotide
  Full comp hsa-miR-589-3p MIMAT0003256
tctgggaaccggcatttgttctga

SEQ ID NO: 3531 - DNA, 18 bp, Artificial Sequence
  Synthetic oligonucleotide
  Full comp hsa-miR-6861-3p MIMAT0027624
ctggggaggagaggtcca

SEQ ID NO: 3532 - DNA, 17 bp, Artificial Sequence
  Synthetic oligonucleotide
  Full comp hsa-miR-4419a MIMAT0018931
tgcagtctcctccctca

SEQ ID NO: 3533 - DNA, 20 bp, Artificial Sequence
  Synthetic oligonucleotide
  Full comp hsa-miR-6722-5p MIMAT0025853
gcatgtggtcgggtgcgcct

SEQ ID NO: 3534 - DNA, 21 bp, Artificial Sequence
  Synthetic oligonucleotide
  Full comp hsa-miR-7853-5p MIMAT0030428
gaagtcaggatctgcatttga

SEQ ID NO: 3535 - DNA, 22 bp, Artificial Sequence
  Synthetic oligonucleotide
  Full comp hsa-miR-5194 MIMAT0021125
ccatcccattccaaacccctca

SEQ ID NO: 3536 - DNA, 22 bp, Artificial Sequence
  Synthetic oligonucleotide
  Full comp hsa-miR-520a-3p MIMAT0002834
acagtccaaagggaagcacttt

SEQ ID NO: 3537 - DNA, 23 bp, Artificial Sequence
  Synthetic oligonucleotide
  Full comp hsa-miR-3192-5p MIMAT0015076
ttccactgctacaacctcccaga

SEQ ID NO: 3538 - DNA, 21 bp, Artificial Sequence
  Synthetic oligonucleotide
  Full comp hsa-miR-6836-3p MIMAT0027575
ctgcggggccgggggaggcat

SEQ ID NO: 3539 - DNA, 23 bp, Artificial Sequence
  Synthetic oligonucleotide
  Full comp hsa-miR-597-3p MIMAT0026619
acgcttgagccacaagagaacca

SEQ ID NO: 3540 - DNA, 23 bp, Artificial Sequence
  Synthetic oligonucleotide
  Full comp hsa-miR-548x-5p MIMAT0022733
caaaaactgcaattacttttgca

SEQ ID NO: 3541 - DNA, 21 bp, Artificial Sequence
  Synthetic oligonucleotide
  Full comp hsa-miR-6888-3p MIMAT0027677
ctggaaacaatcgagacagat

SEQ ID NO: 3542 - DNA, 22 bp, Artificial Sequence
  Synthetic oligonucleotide
  Full comp hsa-miR-6793-5p MIMAT0027486
tcaccccaacccagaacccaca

SEQ ID NO: 3543 - DNA, 24 bp, Artificial Sequence
  Synthetic oligonucleotide
  Full comp hsa-miR-8075 MIMAT0031002
cagacccgacatctgccatcagca

SEQ ID NO: 3544 - DNA, 22 bp, Artificial Sequence
  Synthetic oligonucleotide
  Full comp hsa-miR-1471 MIMAT0007349
acacctggctccacacgcgggc

SEQ ID NO: 3545 - DNA, 21 bp, Artificial Sequence
  Synthetic oligonucleotide
  Full comp hsa-miR-5590-3p MIMAT0022300
ttgccatacatgaactttatt

SEQ ID NO: 3546 - DNA, 22 bp, Artificial Sequence
  Synthetic oligonucleotide
  Full comp hsa-miR-24-3p MIMAT0000080
ctgttcctgctgaactgagcca

SEQ ID NO: 3547 - DNA, 22 bp, Artificial Sequence
  Synthetic oligonucleotide
  Full comp hsa-miR-6825-5p MIMAT0027550
atgctgactccacacctcccca

SEQ ID NO: 3548 - DNA, 22 bp, Artificial Sequence
  Synthetic oligonucleotide
  Full comp hsa-miR-3934-5p MIMAT0018349
ctgcctcagtttccacacctga

SEQ ID NO: 3549 - DNA, 21 bp, Artificial Sequence
  Synthetic oligonucleotide
  Full comp hsa-miR-6508-5p MIMAT0025472
ggtgggtcatgcatttctaga

SEQ ID NO: 3550 - DNA, 20 bp, Artificial Sequence
  Synthetic oligonucleotide
  Full comp hsa-miR-1238-3p MIMAT0005593
ggggcagacagacgaggaag

SEQ ID NO: 3551 - DNA, 22 bp, Artificial Sequence
  Synthetic oligonucleotide
  Full comp hsa-miR-598-3p MIMAT0003266
tgacgatgacaacgatgacgta

SEQ ID NO: 3552 - DNA, 23 bp, Artificial Sequence
  Synthetic oligonucleotide
  Full comp hsa-miR-6773-5p MIMAT0027446
atcctgtttactcctgggcccaa

SEQ ID NO: 3553 - DNA, 20 bp, Artificial Sequence
  Synthetic oligonucleotide
  Full comp hsa-miR-548an MIMAT0019079
caaaaaccacaatgcctttt

SEQ ID NO: 3554 - DNA, 22 bp, Artificial Sequence
  Synthetic oligonucleotide
  Full comp hsa-miR-134-5p MIMAT0000447
cccctctggtcaaccagtcaca

SEQ ID NO: 3555 - DNA, 22 bp, Artificial Sequence
  Synthetic oligonucleotide
  Full comp hsa-miR-7157-3p MIMAT0028225
actcttcatccagtagcacaga

SEQ ID NO: 3556 - DNA, 22 bp, Artificial Sequence
  Synthetic oligonucleotide
  Full comp hsa-miR-4512 MIMAT0019049
tgggcgatacagtgaggccctg

SEQ ID NO: 3557 - DNA, 22 bp, Artificial Sequence
  Synthetic oligonucleotide
  Full comp hsa-miR-6733-5p MIMAT0027367
aactctgagtttgtctttccca

SEQ ID NO: 3558 - DNA, 22 bp, Artificial Sequence
  Synthetic oligonucleotide
  Full comp hsa-miR-6749-5p MIMAT0027398
gctcccccaaccccaggcccga

SEQ ID NO: 3559 - DNA, 21 bp, Artificial Sequence
  Synthetic oligonucleotide
  Full comp hsa-miR-182-3p MIMAT0000260
tagttggcaagtctagaacca

SEQ ID NO: 3560 - DNA, 22 bp, Artificial Sequence
  Synthetic oligonucleotide
  Full comp hsa-miR-625-3p MIMAT0004808
tgagggggaaagttctatagtc

SEQ ID NO: 3561 - DNA, 22 bp, Artificial Sequence
  Synthetic oligonucleotide
  Full comp hsa-miR-616-5p MIMAT0003284
aagtcactgaagggttttgagt

SEQ ID NO: 3562 - DNA, 23 bp, Artificial Sequence
  Synthetic oligonucleotide
  Full comp hsa-miR-138-5p MIMAT0000430
cggcctgattcacaacaccagct

SEQ ID NO: 3563 - DNA, 20 bp, Artificial Sequence
  Synthetic oligonucleotide
  Full comp hsa-miR-4448 MIMAT0018967
tacccctagaccaaggagcc

SEQ ID NO: 3564 - DNA, 18 bp, Artificial Sequence
  Synthetic oligonucleotide
  Full comp hsa-miR-4430 MIMAT0018945
ctccgctcactccagcct

SEQ ID NO: 3565 - DNA, 21 bp, Artificial Sequence
  Synthetic oligonucleotide
  Full comp hsa-miR-3117-3p MIMAT0014979
ctggcactatatgagtcctat

SEQ ID NO: 3566 - DNA, 23 bp, Artificial Sequence
  Synthetic oligonucleotide
  Full comp hsa-miR-3065-3p MIMAT0015378
ctccaacaatatcctggtgctga

SEQ ID NO: 3567 - DNA, 17 bp, Artificial Sequence
  Synthetic oligonucleotide
  Full comp hsa-miR-6852-3p MIMAT0027605
ctgaggaacagaggaca

SEQ ID NO: 3568 - DNA, 22 bp, Artificial Sequence
  Synthetic oligonucleotide
  Full comp hsa-miR-6505-5p MIMAT0025466
gctgagatatcccctattccaa

SEQ ID NO: 3569 - DNA, 23 bp, Artificial Sequence
  Synthetic oligonucleotide
  Full comp hsa-miR-365a-5p MIMAT0009199
cacatctgcccccaaaagtccct

SEQ ID NO: 3570 - DNA, 18 bp, Artificial Sequence
  Synthetic oligonucleotide
  Full comp hsa-miR-6816-3p MIMAT0027533
cgaaggtgcaggtccttc

SEQ ID NO: 3571 - DNA, 22 bp, Artificial Sequence
  Synthetic oligonucleotide
  Full comp hsa-miR-380-3p MIMAT0000735
aagatgtggaccatattacata

SEQ ID NO: 3572 - DNA, 22 bp, Artificial Sequence
  Synthetic oligonucleotide
  Full comp hsa-miR-539-3p MIMAT0022705
aaagaaattgtccttgtatgat

SEQ ID NO: 3573 - DNA, 19 bp, Artificial Sequence
  Synthetic oligonucleotide
  Full comp hsa-miR-4487 MIMAT0019021
ctgcccttcagccagctct

SEQ ID NO: 3574 - DNA, 22 bp, Artificial Sequence
  Synthetic oligonucleotide
  Full comp hsa-miR-548n MIMAT0005916
acaaaatccacaattacttttg

SEQ ID NO: 3575 - DNA, 23 bp, Artificial Sequence
  Synthetic oligonucleotide
  Full comp hsa-miR-217 MIMAT0000274
tccaatcagttcctgatgcagta

SEQ ID NO: 3576 - DNA, 22 bp, Artificial Sequence
  Synthetic oligonucleotide
  Full comp hsa-miR-892b MIMAT0004918
tctacccagaaaggagccagtg

SEQ ID NO: 3577 - DNA, 22 bp, Artificial Sequence
  Synthetic oligonucleotide
  Full comp hsa-miR-6805-5p MIMAT0027510
acactccacaagccgcccccta

SEQ ID NO: 3578 - DNA, 22 bp, Artificial Sequence
  Synthetic oligonucleotide
  Full comp hsa-miR-3942-5p MIMAT0018358
atttcaggtaacagtattgctt

SEQ ID NO: 3579 - DNA, 21 bp, Artificial Sequence
  Synthetic oligonucleotide
  Full comp hsa-miR-1245b-5p MIMAT0019950
tttaagtgatctaaaggccta

SEQ ID NO: 3580 - DNA, 22 bp, Artificial Sequence
  Synthetic oligonucleotide
  Full comp hsa-let-7e-3p MIMAT0004485
ggaaagctaggaggccgtatag

SEQ ID NO: 3581 - DNA, 22 bp, Artificial Sequence
  Synthetic oligonucleotide
  Full comp hsa-miR-659-5p MIMAT0022710
tccttggttcagggaaggtcct

SEQ ID NO: 3582 - DNA, 22 bp, Artificial Sequence
  Synthetic oligonucleotide
  Full comp hsa-miR-3191-5p MIMAT0022732
tggaaggtagacggccagagag

SEQ ID NO: 3583 - DNA, 21 bp, Artificial Sequence
  Synthetic oligonucleotide
  Full comp hsa-miR-6886-3p MIMAT0027673
aggcaggaggagagaagggca

SEQ ID NO: 3584 - DNA, 22 bp, Artificial Sequence
  Synthetic oligonucleotide
  Full comp hsa-miR-3180-3p MIMAT0015058
ggcctccggaagctccgcccca

SEQ ID NO: 3585 - DNA, 23 bp, Artificial Sequence
  Synthetic oligonucleotide
  Full comp hsa-miR-2467-5p MIMAT0019952
gagccaaggctaacagagcctca

SEQ ID NO: 3586 - DNA, 22 bp, Artificial Sequence
  Synthetic oligonucleotide
  Full comp hsa-miR-5688 MIMAT0022479
gctgttttacaggtgtttgtta

SEQ ID NO: 3587 - DNA, 21 bp, Artificial Sequence
  Synthetic oligonucleotide
  Full comp hsa-miR-6872-3p MIMAT0027645
gaccgcggcaggaggcatggg

SEQ ID NO: 3588 - DNA, 21 bp, Artificial Sequence
  Synthetic oligonucleotide
  Full comp hsa-miR-1288-3p MIMAT0005942
tctccagatcagggcagtcca

SEQ ID NO: 3589 - DNA, 23 bp, Artificial Sequence
  Synthetic oligonucleotide
  Full comp hsa-miR-3679-5p MIMAT0018104
tccccttccctgccatatcctca

SEQ ID NO: 3590 - DNA, 23 bp, Artificial Sequence
  Synthetic oligonucleotide
  Full comp hsa-miR-6867-5p MIMAT0027634
tcccttcttcctctacacacaca

SEQ ID NO: 3591 - DNA, 22 bp, Artificial Sequence
  Synthetic oligonucleotide
  Full comp hsa-miR-4494 MIMAT0019029
cctctggtcagccacagtctgg

SEQ ID NO: 3592 - DNA, 22 bp, Artificial Sequence
  Synthetic oligonucleotide
  Full comp hsa-miR-548c-5p MIMAT0004806
ggcaaaaaccgcaattactttt

SEQ ID NO: 3593 - DNA, 23 bp, Artificial Sequence
  Synthetic oligonucleotide
  Full comp hsa-miR-128-1-5p MIMAT0026477
tctcagacagtgctacggccccg

SEQ ID NO: 3594 - DNA, 19 bp, Artificial Sequence
  Synthetic oligonucleotide
  Full comp hsa-miR-7704 MIMAT0030019
cacgtcgccgccgaccccg

SEQ ID NO: 3595 - DNA, 22 bp, Artificial Sequence
  Synthetic oligonucleotide
  Full comp hsa-miR-15b-3p MIMAT0004586
tagagcagcaaataatgattcg

SEQ ID NO: 3596 - DNA, 22 bp, Artificial Sequence
  Synthetic oligonucleotide
  Full comp hsa-miR-664b-3p MIMAT0022272
tgtaggctgggaggcaaatgaa

SEQ ID NO: 3597 - DNA, 24 bp, Artificial Sequence
  Synthetic oligonucleotide
  Full comp hsa-miR-4697-3p MIMAT0019792
accaaggggcaggagtcactgaca

SEQ ID NO: 3598 - DNA, 22 bp, Artificial Sequence
  Synthetic oligonucleotide
  Full comp hsa-miR-4645-3p MIMAT0019706
aaccaggcaagaactactgtct

SEQ ID NO: 3599 - DNA, 19 bp, Artificial Sequence
  Synthetic oligonucleotide
  Full comp hsa-miR-4458 MIMAT0018980
ttcttccacacctacctct

SEQ ID NO: 3600 - DNA, 23 bp, Artificial Sequence
  Synthetic oligonucleotide
  Full comp hsa-miR-181b-5p MIMAT0000257
acccaccgacagcaatgaatgtt

SEQ ID NO: 3601 - DNA, 22 bp, Artificial Sequence
  Synthetic oligonucleotide
  Full comp hsa-miR-196b-5p MIMAT0001080
cccaacaacaggaaactaccta

SEQ ID NO: 3602 - DNA, 22 bp, Artificial Sequence
  Synthetic oligonucleotide
  Full comp hsa-miR-3934-3p MIMAT0022975
tcccagctgtgcaacctgagca

SEQ ID NO: 3603 - DNA, 22 bp, Artificial Sequence
  Synthetic oligonucleotide
  Full comp hsa-miR-219b-5p MIMAT0019747
cgagaattgtggctggacatct

SEQ ID NO: 3604 - DNA, 21 bp, Artificial Sequence
  Synthetic oligonucleotide
  Full comp hsa-miR-4746-3p MIMAT0019881
tcggcccgcaggagcaccgct

SEQ ID NO: 3605 - DNA, 23 bp, Artificial Sequence
  Synthetic oligonucleotide
  Full comp hsa-miR-1266-5p MIMAT0005920
agccctgttctacagccctgagg

SEQ ID NO: 3606 - DNA, 22 bp, Artificial Sequence
  Synthetic oligonucleotide
  Full comp hsa-miR-6791-5p MIMAT0027482
tccgcctgcccagccccagggg

SEQ ID NO: 3607 - DNA, 23 bp, Artificial Sequence
  Synthetic oligonucleotide
  Full comp hsa-miR-409-5p MIMAT0001638
atgcaaagttgctcgggtaacct

SEQ ID NO: 3608 - DNA, 23 bp, Artificial Sequence
  Synthetic oligonucleotide
  Full comp hsa-miR-508-5p MIMAT0004778
catgagtgacgccctctggagta

SEQ ID NO: 3609 - DNA, 22 bp, Artificial Sequence
  Synthetic oligonucleotide
  Full comp hsa-miR-3909 MIMAT0018183
agactgcaggccctagaggaca

SEQ ID NO: 3610 - DNA, 22 bp, Artificial Sequence
  Synthetic oligonucleotide
  Full comp hsa-miR-4504 MIMAT0019040
catgttcatctctattgtcaca

SEQ ID NO: 3611 - DNA, 22 bp, Artificial Sequence
  Synthetic oligonucleotide
  Full comp hsa-miR-6850-5p MIMAT0027600
cgccccggccagcgttccgcac

SEQ ID NO: 3612 - DNA, 22 bp, Artificial Sequence
  Synthetic oligonucleotide
  Full comp hsa-miR-3683 MIMAT0018111
tgatactacttccaatgtcgca

SEQ ID NO: 3613 - DNA, 21 bp, Artificial Sequence
  Synthetic oligonucleotide
  Full comp hsa-miR-587 MIMAT0003253
gtgactcatcacctatggaaa

SEQ ID NO: 3614 - DNA, 18 bp, Artificial Sequence
  Synthetic oligonucleotide
  Full comp hsa-miR-4417 MIMAT0018929
ccctccgggaagcccacc

SEQ ID NO: 3615 - DNA, 22 bp, Artificial Sequence
  Synthetic oligonucleotide
  Full comp hsa-miR-4469 MIMAT0018996
tccgagcgaccctagagggagc

SEQ ID NO: 3616 - DNA, 22 bp, Artificial Sequence
  Synthetic oligonucleotide
  Full comp hsa-miR-6804-3p MIMAT0027509
ctgtgggtgagaggcaggtgcg

SEQ ID NO: 3617 - DNA, 21 bp, Artificial Sequence
  Synthetic oligonucleotide
  Full comp hsa-miR-510-3p MIMAT0026613
tccactcttagaggtttcaat

SEQ ID NO: 3618 - DNA, 22 bp, Artificial Sequence
  Synthetic oligonucleotide
  Full comp hsa-miR-624-5p MIMAT0003293
tgaacacaaggtactggtacta

SEQ ID NO: 3619 - DNA, 19 bp, Artificial Sequence
  Synthetic oligonucleotide
  Full comp hsa-miR-548ap-5p MIMAT0021037
aaagaccgcaattactttt

SEQ ID NO: 3620 - DNA, 20 bp, Artificial Sequence
  Synthetic oligonucleotide
  Full comp hsa-miR-3151-3p MIMAT0027026
aggtgggctgtgggatcagg

SEQ ID NO: 3621 - DNA, 22 bp, Artificial Sequence
  Synthetic oligonucleotide
  Full comp hsa-miR-1304-5p MIMAT0005892
cacatctcactgtagcctcaaa

SEQ ID NO: 3622 - DNA, 22 bp, Artificial Sequence
  Synthetic oligonucleotide
  Full comp hsa-miR-193b-5p MIMAT0004767
tcatctcgccctcaaaaccccg

SEQ ID NO: 3623 - DNA, 20 bp, Artificial Sequence
  Synthetic oligonucleotide
  Full comp hsa-miR-6074 MIMAT0023699
ccacctagcctctgaatatc

SEQ ID NO: 3624 - DNA, 19 bp, Artificial Sequence
  Synthetic oligonucleotide
  Full comp hsa-miR-7155-3p MIMAT0028221
ggtctgaggtcttgggcca

SEQ ID NO: 3625 - DNA, 23 bp, Artificial Sequence
  Synthetic oligonucleotide
  Full comp hsa-miR-8087 MIMAT0031014
cccctgtaatccaagaagtcttc

SEQ ID NO: 3626 - DNA, 23 bp, Artificial Sequence
  Synthetic oligonucleotide
  Full comp hsa-miR-550a-5p MIMAT0004800
gggctcttactccctcaggcact

SEQ ID NO: 3627 - DNA, 22 bp, Artificial Sequence
  Synthetic oligonucleotide
  Full comp hsa-miR-6510-5p MIMAT0025476
gactcctctctctcccctgctg

SEQ ID NO: 3628 - DNA, 23 bp, Artificial Sequence
  Synthetic oligonucleotide
  Full comp hsa-miR-3605-5p MIMAT0017981
ggcttccttgctatccatcctca

SEQ ID NO: 3629 - DNA, 20 bp, Artificial Sequence
  Synthetic oligonucleotide
  Full comp hsa-miR-1268b MIMAT0018925
cacccccaccaccacgcccg

SEQ ID NO: 3630 - DNA, 19 bp, Artificial Sequence
  Synthetic oligonucleotide
  Full comp hsa-miR-6129 MIMAT0024613
tatacacccaactccctca

SEQ ID NO: 3631 - DNA, 22 bp, Artificial Sequence
  Synthetic oligonucleotide
  Full comp hsa-miR-6857-5p MIMAT0027614
actggcctgacccaatccccaa

SEQ ID NO: 3632 - DNA, 23 bp, Artificial Sequence
  Synthetic oligonucleotide
  Full comp hsa-miR-215-3p MIMAT0026476
tattggcctaaagaaatgacaga

SEQ ID NO: 3633 - DNA, 22 bp, Artificial Sequence
  Synthetic oligonucleotide
  Full comp hsa-miR-30b-3p MIMAT0004589
gaagtaaacatccacctcccag

SEQ ID NO: 3634 - DNA, 21 bp, Artificial Sequence
  Synthetic oligonucleotide
  Full comp hsa-miR-4687-3p MIMAT0019775
gcctgccccctccaacagcca

SEQ ID NO: 3635 - DNA, 22 bp, Artificial Sequence
  Synthetic oligonucleotide
  Full comp hsa-miR-4794 MIMAT0019967
acagtctcgtgagatagccaga

SEQ ID NO: 3636 - DNA, 20 bp, Artificial Sequence
  Synthetic oligonucleotide
  Full comp hsa-miR-6727-3p MIMAT0027356
ctgcggaggaggtggcagga

SEQ ID NO: 3637 - DNA, 23 bp, Artificial Sequence
  Synthetic oligonucleotide
  Full comp hsa-miR-516a-5p MIMAT0004770
gaaagtgcttctttcctcgagaa

SEQ ID NO: 3638 - DNA, 24 bp, Artificial Sequence
  Synthetic oligonucleotide
  Full comp hsa-miR-6806-5p MIMAT0027512
cctgggccctgcctcatgcctaca

SEQ ID NO: 3639 - DNA, 23 bp, Artificial Sequence
  Synthetic oligonucleotide
  Full comp hsa-miR-29b-3p MIMAT0000100
aacactgatttcaaatggtgcta

SEQ ID NO: 3640 - DNA, 22 bp, Artificial Sequence
  Synthetic oligonucleotide
  Full comp hsa-miR-4713-3p MIMAT0019821
ttctcccactgtctggatccca

SEQ ID NO: 3641 - DNA, 22 bp, Artificial Sequence
  Synthetic oligonucleotide
  Full comp hsa-miR-6755-3p MIMAT0027411
ctagggaaaaaacatgacaaca

SEQ ID NO: 3642 - DNA, 21 bp, Artificial Sequence
  Synthetic oligonucleotide
  Full comp hsa-miR-4433b-5p MIMAT0030413
acaggagtgggggtgggacat

SEQ ID NO: 3643 - DNA, 22 bp, Artificial Sequence
  Synthetic oligonucleotide
  Full comp hsa-miR-4659b-3p MIMAT0019734
agctgccatgtctaagaagaaa

SEQ ID NO: 3644 - DNA, 22 bp, Artificial Sequence
  Synthetic oligonucleotide
  Full comp hsa-miR-8052 MIMAT0030979
gctcatgccctctacagtcccg

SEQ ID NO: 3645 - DNA, 23 bp, Artificial Sequence
  Synthetic oligonucleotide
  Full comp hsa-miR-6513-5p MIMAT0025482
agacatgtggcgtcaatcccaaa

SEQ ID NO: 3646 - DNA, 20 bp, Artificial Sequence
  Synthetic oligonucleotide
  Full comp hsa-miR-6872-5p MIMAT0027644
ccttgcctcctgatgcgaga

SEQ ID NO: 3647 - DNA, 21 bp, Artificial Sequence
  Synthetic oligonucleotide
  Full comp hsa-miR-5011-5p MIMAT0021045
gagtgcatggctgtatatata

SEQ ID NO: 3648 - DNA, 21 bp, Artificial Sequence
  Synthetic oligonucleotide
  Full comp hsa-miR-431-5p MIMAT0001625
tgcatgacggcctgcaagaca

SEQ ID NO: 3649 - DNA, 24 bp, Artificial Sequence
  Synthetic oligonucleotide
  Full comp hsa-miR-7974 MIMAT0031177
gggctcaggagagcatcacagcct

SEQ ID NO: 3650 - DNA, 23 bp, Artificial Sequence
  Synthetic oligonucleotide
  Full comp hsa-miR-6768-5p MIMAT0027436
cagggccccgcttttcctgtgtg

SEQ ID NO: 3651 - DNA, 22 bp, Artificial Sequence
  Synthetic oligonucleotide
  Full comp hsa-miR-6516-3p MIMAT0030418
tgtttgcagtatcatacatgat

SEQ ID NO: 3652 - DNA, 22 bp, Artificial Sequence
  Synthetic oligonucleotide
  Full comp hsa-miR-200b-3p MIMAT0000318
tcatcattaccaggcagtatta

SEQ ID NO: 3653 - DNA, 21 bp, Artificial Sequence
  Synthetic oligonucleotide
  Full comp hsa-miR-548ar-5p MIMAT0022265
gcaaaaactgcaattactttt

SEQ ID NO: 3654 - DNA, 17 bp, Artificial Sequence
  Synthetic oligonucleotide
  Full comp hsa-miR-3201 MIMAT0015086
atttttcttcatatccc

SEQ ID NO: 3655 - DNA, 24 bp, Artificial Sequence
  Synthetic oligonucleotide
  Full comp hsa-miR-1249-5p MIMAT0032029
aacttggcccatctcctccctcct

SEQ ID NO: 3656 - DNA, 22 bp, Artificial Sequence
  Synthetic oligonucleotide
  Full comp hsa-miR-6499-5p MIMAT0025450
actgcagtgctcttgcgcccga

SEQ ID NO: 3657 - DNA, 22 bp, Artificial Sequence
  Synthetic oligonucleotide
  Full comp hsa-miR-1305 MIMAT0005893
tctctcccattagagttgaaaa

SEQ ID NO: 3658 - DNA, 22 bp, Artificial Sequence
  Synthetic oligonucleotide
  Full comp hsa-miR-937-3p MIMAT0004980
ggcagagagtcagagcgcggat

SEQ ID NO: 3659 - DNA, 21 bp, Artificial Sequence
  Synthetic oligonucleotide
  Full comp hsa-miR-432-3p MIMAT0002815
agacatggaggagccatccag

SEQ ID NO: 3660 - DNA, 22 bp, Artificial Sequence
  Synthetic oligonucleotide
  Full comp hsa-miR-6870-3p MIMAT0027641
ctgaaaggagatggggatgagc

SEQ ID NO: 3661 - DNA, 21 bp, Artificial Sequence
  Synthetic oligonucleotide
  Full comp hsa-miR-6510-3p MIMAT0025477
ctgcaggagacagagtcggtg

SEQ ID NO: 3662 - DNA, 21 bp, Artificial Sequence
  Synthetic oligonucleotide
  Full comp hsa-miR-3660 MIMAT0018081
tcaaaatgctctcctgtcagt

SEQ ID NO: 3663 - DNA, 20 bp, Artificial Sequence
  Synthetic oligonucleotide
  Full comp hsa-miR-550b-3p MIMAT0018445
cagtgcctgagggagtaaga

SEQ ID NO: 3664 - DNA, 21 bp, Artificial Sequence
  Synthetic oligonucleotide
  Full comp hsa-miR-606 MIMAT0003274
atctttgattttcagtagttt

SEQ ID NO: 3665 - DNA, 19 bp, Artificial Sequence
  Synthetic oligonucleotide
  Full comp hsa-miR-3180 MIMAT0018178
ctccggaagctccgcccca

SEQ ID NO: 3666 - DNA, 23 bp, Artificial Sequence
  Synthetic oligonucleotide
  Full comp hsa-miR-421 MIMAT0003339
gcgcccaattaatgtctgttgat

SEQ ID NO: 3667 - DNA, 22 bp, Artificial Sequence
  Synthetic oligonucleotide
  Full comp hsa-miR-519e-3p MIMAT0002829
aacactctaaaaggaggcactt

SEQ ID NO: 3668 - DNA, 21 bp, Artificial Sequence
  Synthetic oligonucleotide
  Full comp hsa-miR-151a-5p MIMAT0004697
actagactgtgagctcctcga

SEQ ID NO: 3669 - DNA, 20 bp, Artificial Sequence
  Synthetic oligonucleotide
  Full comp hsa-miR-378g MIMAT0018937
cttctgactccaagcccagt

SEQ ID NO: 3670 - DNA, 22 bp, Artificial Sequence
  Synthetic oligonucleotide
  Full comp hsa-miR-29a-5p MIMAT0004503
ctgaacaccaaaagaaatcagt

SEQ ID NO: 3671 - DNA, 21 bp, Artificial Sequence
  Synthetic oligonucleotide
  Full comp hsa-miR-6891-3p MIMAT0027683
gaaaggaggggaagatgaggg

SEQ ID NO: 3672 - DNA, 21 bp, Artificial Sequence
  Synthetic oligonucleotide
  Full comp hsa-miR-6894-3p MIMAT0027689
ctggaggaagagggcaggcaa

SEQ ID NO: 3673 - DNA, 22 bp, Artificial Sequence
  Synthetic oligonucleotide
  Full comp hsa-miR-521 MIMAT0002854
acactctaaagggaagtgcgtt

SEQ ID NO: 3674 - DNA, 23 bp, Artificial Sequence
  Synthetic oligonucleotide
  Full comp hsa-miR-518c-5p MIMAT0002847
cagaaagtgcttccctccagaga

SEQ ID NO: 3675 - DNA, 19 bp, Artificial Sequence
  Synthetic oligonucleotide
  Full comp hsa-miR-646 MIMAT0003316
gcctcagaggcagctgctt

SEQ ID NO: 3676 - DNA, 22 bp, Artificial Sequence
  Synthetic oligonucleotide
  Full comp hsa-miR-4788 MIMAT0019958
gcctcccttagctggtccgtaa

SEQ ID NO: 3677 - DNA, 22 bp, Artificial Sequence
  Synthetic oligonucleotide
  Full comp hsa-miR-590-5p MIMAT0003258
ctgcacttttatgaataagctc

SEQ ID NO: 3678 - DNA, 17 bp, Artificial Sequence
  Synthetic oligonucleotide
  Full comp hsa-miR-4483 MIMAT0019017
caacaacagaccacccc

SEQ ID NO: 3679 - DNA, 17 bp, Artificial Sequence
  Synthetic oligonucleotide
  Full comp hsa-miR-1281 MIMAT0005939
gggagaggaggaggcga

SEQ ID NO: 3680 - DNA, 22 bp, Artificial Sequence
  Synthetic oligonucleotide
  Full comp hsa-miR-5192 MIMAT0021123
accacctggaatccactctcct

SEQ ID NO: 3681 - DNA, 21 bp, Artificial Sequence
  Synthetic oligonucleotide
  Full comp hsa-miR-3657 MIMAT0018077
aatcaccaataatgggacaca

SEQ ID NO: 3682 - DNA, 22 bp, Artificial Sequence
  Synthetic oligonucleotide
  Full comp hsa-miR-148a-3p MIMAT0000243
acaaagttctgtagtgcactga

SEQ ID NO: 3683 - DNA, 23 bp, Artificial Sequence
  Synthetic oligonucleotide
  Full comp hsa-miR-4691-5p MIMAT0019781
ccgcagctcatggcctggaggac

SEQ ID NO: 3684 - DNA, 21 bp, Artificial Sequence
  Synthetic oligonucleotide
  Full comp hsa-miR-3151-5p MIMAT0015024
acctgatcccattgccccacc

SEQ ID NO: 3685 - DNA, 21 bp, Artificial Sequence
  Synthetic oligonucleotide
  Full comp hsa-miR-8054 MIMAT0030981
acccatccgatctgtactttc

SEQ ID NO: 3686 - DNA, 22 bp, Artificial Sequence
  Synthetic oligonucleotide
  Full comp hsa-miR-4482-3p MIMAT0020958
gagccccactgagaaatagaaa

SEQ ID NO: 3687 - DNA, 23 bp, Artificial Sequence
  Synthetic oligonucleotide
  Full comp hsa-miR-412-5p MIMAT0026557
attactttccaactggtcgacca

SEQ ID NO: 3688 - DNA, 21 bp, Artificial Sequence
  Synthetic oligonucleotide
  Full comp hsa-miR-6851-3p MIMAT0027603
ctggaggggtacaaagggcca

SEQ ID NO: 3689 - DNA, 22 bp, Artificial Sequence
  Synthetic oligonucleotide
  Full comp hsa-miR-6502-5p MIMAT0025460
ggtcaacaatctttctagagct

SEQ ID NO: 3690 - DNA, 21 bp, Artificial Sequence
  Synthetic oligonucleotide
  Full comp hsa-miR-2113 MIMAT0009206
gtgacagagccaagcacaaat

SEQ ID NO: 3691 - DNA, 22 bp, Artificial Sequence
  Synthetic oligonucleotide
  Full comp hsa-miR-570-3p MIMAT0003235
gcaaaggtaattgctgttttcg

SEQ ID NO: 3692 - DNA, 21 bp, Artificial Sequence
  Synthetic oligonucleotide
  Full comp hsa-miR-6736-3p MIMAT0027374
ctgtgggtagagaggagctga

SEQ ID NO: 3693 - DNA, 23 bp, Artificial Sequence
  Synthetic oligonucleotide
  Full comp hsa-miR-4757-5p MIMAT0019901
acaccgtgacgtcacagaggcct

SEQ ID NO: 3694 - DNA, 22 bp, Artificial Sequence
  Synthetic oligonucleotide
  Full comp hsa-miR-3135a MIMAT0015001
cactgcagtctcagcctaggca

SEQ ID NO: 3695 - DNA, 20 bp, Artificial Sequence
  Synthetic oligonucleotide
  Full comp hsa-miR-324-3p MIMAT0000762
ccagcagcacctggggcagt

SEQ ID NO: 3696 - DNA, 21 bp, Artificial Sequence
  Synthetic oligonucleotide
  Full comp hsa-miR-622 MIMAT0003291
gctccaacctcagcagactgt

SEQ ID NO: 3697 - DNA, 19 bp, Artificial Sequence
  Synthetic oligonucleotide
  Full comp hsa-miR-5571-3p MIMAT0022258
cagaggagcctcctaggac

SEQ ID NO: 3698 - DNA, 21 bp, Artificial Sequence
  Synthetic oligonucleotide
  Full comp hsa-miR-581 MIMAT0003246
actgatctagagaacacaaga

SEQ ID NO: 3699 - DNA, 23 bp, Artificial Sequence
  Synthetic oligonucleotide
  Full comp hsa-miR-7156-3p MIMAT0028223
accagttccccaagtggctgcag

SEQ ID NO: 3700 - DNA, 24 bp, Artificial Sequence
  Synthetic oligonucleotide
  Full comp hsa-miR-520g-3p MIMAT0002858
acactctaaagggaagcactttgt

SEQ ID NO: 3701 - DNA, 18 bp, Artificial Sequence
  Synthetic oligonucleotide
  Full comp hsa-miR-1207-3p MIMAT0005872
gaaatgagggccagctga

SEQ ID NO: 3702 - DNA, 21 bp, Artificial Sequence
  Synthetic oligonucleotide
  Full comp hsa-miR-506-3p MIMAT0002878
tctactcagaagggtgcctta

SEQ ID NO: 3703 - DNA, 22 bp, Artificial Sequence
  Synthetic oligonucleotide
  Full comp hsa-miR-6811-5p MIMAT0027522
agtgctgtacacaggcctgcat

SEQ ID NO: 3704 - DNA, 25 bp, Artificial Sequence
  Synthetic oligonucleotide
  Full comp hsa-miR-6775-5p MIMAT0027450
ccagcctccctcccccatgccccga

SEQ ID NO: 3705 - DNA, 22 bp, Artificial Sequence
  Synthetic oligonucleotide
  Full comp hsa-miR-6748-5p MIMAT0027396
aatccagtccttcccacccaca

SEQ ID NO: 3706 - DNA, 22 bp, Artificial Sequence
  Synthetic oligonucleotide
  Full comp hsa-miR-1273h-3p MIMAT0030416
gcctgggaggtcgagtctgcag

SEQ ID NO: 3707 - DNA, 22 bp, Artificial Sequence
  Synthetic oligonucleotide
  Full comp hsa-miR-31-3p MIMAT0004504
atggcaatatgttggcatagca

SEQ ID NO: 3708 - DNA, 21 bp, Artificial Sequence
  Synthetic oligonucleotide
  Full comp hsa-miR-676-5p MIMAT0018203
tgcaagtcctgaggttgaaga

SEQ ID NO: 3709 - DNA, 22 bp, Artificial Sequence
  Synthetic oligonucleotide
  Full comp hsa-miR-2115-3p MIMAT0011159
ctagcctccatgaattctgatg

SEQ ID NO: 3710 - DNA, 22 bp, Artificial Sequence
  Synthetic oligonucleotide
  Full comp hsa-miR-7152-5p MIMAT0028214
ggtctggttggaggacaggaaa

SEQ ID NO: 3711 - DNA, 22 bp, Artificial Sequence
  Synthetic oligonucleotide
  Full comp hsa-miR-4460 MIMAT0018982
aaggtaaattcacaaccactat

SEQ ID NO: 3712 - DNA, 22 bp, Artificial Sequence
  Synthetic oligonucleotide
  Full comp hsa-miR-5681a MIMAT0022469
aagaggtattgccaccctttct

SEQ ID NO: 3713 - DNA, 23 bp, Artificial Sequence
  Synthetic oligonucleotide
  Full comp hsa-miR-3974 MIMAT0019359
gcattaaccttacaatgaccttt

SEQ ID NO: 3714 - DNA, 20 bp, Artificial Sequence
  Synthetic oligonucleotide
  Full comp hsa-miR-6083 MIMAT0023708
cccacagcctctgatataag

SEQ ID NO: 3715 - DNA, 23 bp, Artificial Sequence
  Synthetic oligonucleotide
  Full comp hsa-miR-7156-5p MIMAT0028222
tctgacagccagtttgagaacaa

SEQ ID NO: 3716 - DNA, 22 bp, Artificial Sequence
  Synthetic oligonucleotide
  Full comp hsa-miR-6802-3p MIMAT0027505
ctgcttaggtgagaggggtgaa

SEQ ID NO: 3717 - DNA, 23 bp, Artificial Sequence
  Synthetic oligonucleotide
  Full comp hsa-miR-6780a-5p MIMAT0027460
tctccagctgtcttccctcccaa

SEQ ID NO: 3718 - DNA, 22 bp, Artificial Sequence
  Synthetic oligonucleotide
  Full comp hsa-miR-484 MIMAT0002174
atcgggaggggactgagcctga

SEQ ID NO: 3719 - DNA, 24 bp, Artificial Sequence
  Synthetic oligonucleotide
  Full comp hsa-miR-6770-5p MIMAT0027440
tcacgtgcaagctgtgccttctca

SEQ ID NO: 3720 - DNA, 21 bp, Artificial Sequence
  Synthetic oligonucleotide
  Full comp hsa-miR-382-3p MIMAT0022697
aagtgttgtccgtgaatgatt

SEQ ID NO: 3721 - DNA, 22 bp, Artificial Sequence
  Synthetic oligonucleotide
  Full comp hsa-miR-4752 MIMAT0019889
agcacatccttgagatccacaa

SEQ ID NO: 3722 - DNA, 22 bp, Artificial Sequence
  Synthetic oligonucleotide
  Full comp hsa-miR-4701-5p MIMAT0019798
aaggggtaggtgtggtggccaa

SEQ ID NO: 3723 - DNA, 23 bp, Artificial Sequence
  Synthetic oligonucleotide
  Full comp hsa-miR-6848-5p MIMAT0027596
accatggcccatcccagccccca

SEQ ID NO: 3724 - DNA, 23 bp, Artificial Sequence
  Synthetic oligonucleotide
  Full comp hsa-miR-6724-5p MIMAT0025856
ccccacgcccgccgcgggcccag

SEQ ID NO: 3725 - DNA, 20 bp, Artificial Sequence
  Synthetic oligonucleotide
  Full comp hsa-miR-124-3p MIMAT0000422
ggcattcaccgcgtgcctta

SEQ ID NO: 3726 - DNA, 22 bp, Artificial Sequence
  Synthetic oligonucleotide
  Full comp hsa-miR-3923 MIMAT0018198
ccctaatccaacattactagtt

SEQ ID NO: 3727 - DNA, 21 bp, Artificial Sequence
  Synthetic oligonucleotide
  Full comp hsa-miR-4422 MIMAT0018935
tgggtacttcctgatgctttt

SEQ ID NO: 3728 - DNA, 22 bp, Artificial Sequence
  Synthetic oligonucleotide
  Full comp hsa-miR-96-3p MIMAT0004510
catattggcactgcacatgatt

SEQ ID NO: 3729 - DNA, 17 bp, Artificial Sequence
  Synthetic oligonucleotide
  Full comp hsa-miR-4441 MIMAT0018959
tacaatctcctccctgt

SEQ ID NO: 3730 - DNA, 17 bp, Artificial Sequence
  Synthetic oligonucleotide
  Full comp hsa-miR-4535 MIMAT0019075
gtcccagccaggtccac

SEQ ID NO: 3731 - DNA, 21 bp, Artificial Sequence
  Synthetic oligonucleotide
  Full comp hsa-miR-6831-3p MIMAT0027563
ctgtagagtgggagttagtca

SEQ ID NO: 3732 - DNA, 21 bp, Artificial Sequence
  Synthetic oligonucleotide
  Full comp hsa-miR-4676-5p MIMAT0019758
tcactgtctcaccactggctc

SEQ ID NO: 3733 - DNA, 24 bp, Artificial Sequence
  Synthetic oligonucleotide
  Full comp hsa-miR-1324 MIMAT0005956
gaaagtgcatagaattctgtctgg

SEQ ID NO: 3734 - DNA, 19 bp, Artificial Sequence
  Synthetic oligonucleotide
  Full comp hsa-miR-320d MIMAT0006764
tcctctcaacccagctttt

SEQ ID NO: 3735 - DNA, 23 bp, Artificial Sequence
  Synthetic oligonucleotide
  Full comp hsa-miR-526b-5p MIMAT0002835
acagaaagtgcttccctcaagag

SEQ ID NO: 3736 - DNA, 22 bp, Artificial Sequence
  Synthetic oligonucleotide
  Full comp hsa-miR-3620-5p MIMAT0022967
ggcccagcccagcccagcccac

SEQ ID NO: 3737 - DNA, 21 bp, Artificial Sequence
  Synthetic oligonucleotide
  Full comp hsa-miR-3926 MIMAT0018201
tctctgcctgctttttggcca

SEQ ID NO: 3738 - DNA, 22 bp, Artificial Sequence
  Synthetic oligonucleotide
  Full comp hsa-miR-95-3p MIMAT0000094
tgctcaataaatacccgttgaa

SEQ ID NO: 3739 - DNA, 22 bp, Artificial Sequence
  Synthetic oligonucleotide
  Full comp hsa-miR-4688 MIMAT0019777
cccaggtcctctgctgccccta

SEQ ID NO: 3740 - DNA, 21 bp, Artificial Sequence
  Synthetic oligonucleotide
  Full comp hsa-miR-222-3p MIMAT0000279
acccagtagccagatgtagct

SEQ ID NO: 3741 - DNA, 22 bp, Artificial Sequence
  Synthetic oligonucleotide
  Full comp hsa-miR-617 MIMAT0003286
gccaccttcaaatgggaagtct

SEQ ID NO: 3742 - DNA, 21 bp, Artificial Sequence
  Synthetic oligonucleotide
  Full comp hsa-miR-6865-3p MIMAT0027631
ggcggtagggaaagagggtgt

SEQ ID NO: 3743 - DNA, 18 bp, Artificial Sequence
  Synthetic oligonucleotide
  Full comp hsa-miR-4285 MIMAT0016913
atgagtcggactcgccgc

SEQ ID NO: 3744 - DNA, 21 bp, Artificial Sequence
  Synthetic oligonucleotide
  Full comp hsa-miR-1178-3p MIMAT0005823
ctagggaagaacagtgagcaa

SEQ ID NO: 3745 - DNA, 22 bp, Artificial Sequence
  Synthetic oligonucleotide
  Full comp hsa-miR-4796-5p MIMAT0019970
gtaaagtgacagagtatagaca

SEQ ID NO: 3746 - DNA, 17 bp, Artificial Sequence
  Synthetic oligonucleotide
  Full comp hsa-miR-1297 MIMAT0005886
cacctgaattacttgaa

SEQ ID NO: 3747 - DNA, 22 bp, Artificial Sequence
  Synthetic oligonucleotide
  Full comp hsa-miR-7852-3p MIMAT0030427
aaatgcctttgactactacata

SEQ ID NO: 3748 - DNA, 20 bp, Artificial Sequence
  Synthetic oligonucleotide
  Full comp hsa-miR-1208 MIMAT0005873
tccgcctgtctgaacagtga

SEQ ID NO: 3749 - DNA, 21 bp, Artificial Sequence
  Synthetic oligonucleotide
  Full comp hsa-miR-4522 MIMAT0019060
accggcctacaggcagagtca

SEQ ID NO: 3750 - DNA, 22 bp, Artificial Sequence
  Synthetic oligonucleotide
  Full comp hsa-miR-34c-3p MIMAT0004677
cctggccgtgtggttagtgatt

SEQ ID NO: 3751 - DNA, 22 bp, Artificial Sequence
  Synthetic oligonucleotide
  Full comp hsa-miR-6784-3p MIMAT0027469
ctggggcagagttggggtgaga

SEQ ID NO: 3752 - DNA, 23 bp, Artificial Sequence
  Synthetic oligonucleotide
  Full comp hsa-miR-767-3p MIMAT0003883
agaaaccatggggtatgagcaga

SEQ ID NO: 3753 - DNA, 22 bp, Artificial Sequence
  Synthetic oligonucleotide
  Full comp hsa-miR-6771-5p MIMAT0027442
gcctggcccatgccctcccgag

SEQ ID NO: 3754 - DNA, 22 bp, Artificial Sequence
  Synthetic oligonucleotide
  Full comp hsa-miR-6875-3p MIMAT0027651
atggagccagggcaggaagaat

SEQ ID NO: 3755 - DNA, 21 bp, Artificial Sequence
  Synthetic oligonucleotide
  Full comp hsa-miR-1253 MIMAT0005904
tgcaggctgatcttcttctct

SEQ ID NO: 3756 - DNA, 21 bp, Artificial Sequence
  Synthetic oligonucleotide
  Full comp hsa-miR-4764-5p MIMAT0019914
agataactccttccacatcca

SEQ ID NO: 3757 - DNA, 21 bp, Artificial Sequence
  Synthetic oligonucleotide
  Full comp hsa-miR-6789-3p MIMAT0027479
ctggaggagacacgggcgccg

SEQ ID NO: 3758 - DNA, 23 bp, Artificial Sequence
  Synthetic oligonucleotide
  Full comp hsa-miR-134-3p MIMAT0026481
ttggtgactaggtggcccacagg

SEQ ID NO: 3759 - DNA, 22 bp, Artificial Sequence
  Synthetic oligonucleotide
  Full comp hsa-miR-936 MIMAT0004979
ctgcgattcctccctctactgt

SEQ ID NO: 3760 - DNA, 25 bp, Artificial Sequence
  Synthetic oligonucleotide
  Full comp hsa-miR-921 MIMAT0004971
gaatcctggttctgtccctcactag

SEQ ID NO: 3761 - DNA, 22 bp, Artificial Sequence
  Synthetic oligonucleotide
  Full comp hsa-miR-193a-3p MIMAT0000459
actgggactttgtaggccagtt

SEQ ID NO: 3762 - DNA, 21 bp, Artificial Sequence
  Synthetic oligonucleotide
  Full comp hsa-miR-1185-5p MIMAT0005798
aacatacaaagggtatcctct

SEQ ID NO: 3763 - DNA, 23 bp, Artificial Sequence
  Synthetic oligonucleotide
  Full comp hsa-miR-6847-5p MIMAT0027594
gctcacactccactgtcctctgt

SEQ ID NO: 3764 - DNA, 20 bp, Artificial Sequence
  Synthetic oligonucleotide
  Full comp hsa-miR-1199-5p MIMAT0031119
ctgcgcggcccgggctcagg

SEQ ID NO: 3765 - DNA, 21 bp, Artificial Sequence
  Synthetic oligonucleotide
  Full comp hsa-miR-4655-3p MIMAT0019722
ccccggggacctgacgagggt

SEQ ID NO: 3766 - DNA, 21 bp, Artificial Sequence
  Synthetic oligonucleotide
  Full comp hsa-miR-6833-3p MIMAT0027567
ctgaggaagtggagagagaaa

SEQ ID NO: 3767 - DNA, 22 bp, Artificial Sequence
  Synthetic oligonucleotide
  Full comp hsa-miR-1277-3p MIMAT0005933
aaaatacatatatatctacgta

SEQ ID NO: 3768 - DNA, 23 bp, Artificial Sequence
  Synthetic oligonucleotide
  Full comp hsa-miR-4776-3p MIMAT0019933
atgcagtggaccaggatggcaag

SEQ ID NO: 3769 - DNA, 23 bp, Artificial Sequence
  Synthetic oligonucleotide
  Full comp hsa-miR-1538 MIMAT0007400
aggaacagcagcagcccgggccg

SEQ ID NO: 3770 - DNA, 22 bp, Artificial Sequence
  Synthetic oligonucleotide
  Full comp hsa-miR-3116 MIMAT0014978
agtccctactatgttccaggca

SEQ ID NO: 3771 - DNA, 22 bp, Artificial Sequence
  Synthetic oligonucleotide
  Full comp hsa-miR-208a-3p MIMAT0000241
acaagctttttgctcgtcttat

SEQ ID NO: 3772 - DNA, 22 bp, Artificial Sequence
  Synthetic oligonucleotide
  Full comp hsa-miR-30c-2-3p MIMAT0004550
agagtaaacagccttctcccag

SEQ ID NO: 3773 - DNA, 22 bp, Artificial Sequence
  Synthetic oligonucleotide
  Full comp hsa-miR-30e-3p MIMAT0000693
gctgtaaacatccgactgaaag

SEQ ID NO: 3774 - DNA, 23 bp, Artificial Sequence
  Synthetic oligonucleotide
  Full comp hsa-miR-149-5p MIMAT0000450
gggagtgaagacacggagccaga

SEQ ID NO: 3775 - DNA, 22 bp, Artificial Sequence
  Synthetic oligonucleotide
  Full comp hsa-miR-4646-5p MIMAT0019707
tccctcagctcctcttcccagt

SEQ ID NO: 3776 - DNA, 22 bp, Artificial Sequence
  Synthetic oligonucleotide
  Full comp hsa-miR-3198 MIMAT0015083
tctccattccccaggactccac

SEQ ID NO: 3777 - DNA, 23 bp, Artificial Sequence
  Synthetic oligonucleotide
  Full comp hsa-miR-221-3p MIMAT0000278
gaaacccagcagacaatgtagct

SEQ ID NO: 3778 - DNA, 23 bp, Artificial Sequence
  Synthetic oligonucleotide
  Full comp hsa-miR-3139 MIMAT0015007
aacaggcatctgttgagctccta

SEQ ID NO: 3779 - DNA, 22 bp, Artificial Sequence
  Synthetic oligonucleotide
  Full comp hsa-miR-520f-5p MIMAT0026609
agaaagcgcttccctttagagg

SEQ ID NO: 3780 - DNA, 21 bp, Artificial Sequence
  Synthetic oligonucleotide
  Full comp hsa-miR-4999-5p MIMAT0021017
tcactacctgacaatacagca

SEQ ID NO: 3781 - DNA, 22 bp, Artificial Sequence
  Synthetic oligonucleotide
  Full comp hsa-miR-20b-3p MIMAT0004752
ctggaagtgcccatactacagt

SEQ ID NO: 3782 - DNA, 23 bp, Artificial Sequence
  Synthetic oligonucleotide
  Full comp hsa-miR-5188 MIMAT0021119
ctccggtttaaatgggtccgatt

SEQ ID NO: 3783 - DNA, 21 bp, Artificial Sequence
  Synthetic oligonucleotide
  Full comp hsa-miR-652-3p MIMAT0003322
cacaaccctagtggcgccatt

SEQ ID NO: 3784 - DNA, 20 bp, Artificial Sequence
  Synthetic oligonucleotide
  Full comp hsa-miR-4737 MIMAT0019863
cactgtcagcatcctcgcat

SEQ ID NO: 3785 - DNA, 17 bp, Artificial Sequence
  Synthetic oligonucleotide
  Full comp hsa-miR-3656 MIMAT0018076
ccacccccgcacccgcc

SEQ ID NO: 3786 - DNA, 23 bp, Artificial Sequence
  Synthetic oligonucleotide
  Full comp hsa-miR-498 MIMAT0002824
gaaaaacgccccctggcttgaaa

SEQ ID NO: 3787 - DNA, 22 bp, Artificial Sequence
  Synthetic oligonucleotide
  Full comp hsa-miR-4734 MIMAT0019859
cgccctgaccgcagcccgcagc

SEQ ID NO: 3788 - DNA, 22 bp, Artificial Sequence
  Synthetic oligonucleotide
  Full comp hsa-miR-1469 MIMAT0007347
ggagcccgcgccccgcgccgag

SEQ ID NO: 3789 - DNA, 22 bp, Artificial Sequence
  Synthetic oligonucleotide
  Full comp hsa-miR-4490 MIMAT0019025
tatgcccaaatctcttaccaga

SEQ ID NO: 3790 - DNA, 19 bp, Artificial Sequence
  Synthetic oligonucleotide
  Full comp hsa-miR-4260 MIMAT0016881
tgggactccatgccccaag

SEQ ID NO: 3791 - DNA, 22 bp, Artificial Sequence
  Synthetic oligonucleotide
  Full comp hsa-miR-2115-5p MIMAT0011158
tccatcaggagtcatggaagct

SEQ ID NO: 3792 - DNA, 22 bp, Artificial Sequence
  Synthetic oligonucleotide
  Full comp hsa-miR-5681b MIMAT0022480
actagaaagggtggcaatacct

SEQ ID NO: 3793 - DNA, 22 bp, Artificial Sequence
  Synthetic oligonucleotide
  Full comp hsa-miR-4662a-5p MIMAT0019731
ctaaagatggacaattggctaa

SEQ ID NO: 3794 - DNA, 23 bp, Artificial Sequence
  Synthetic oligonucleotide
  Full comp hsa-miR-633 MIMAT0003303
tttattgtggtagatactattag

SEQ ID NO: 3795 - DNA, 20 bp, Artificial Sequence
  Synthetic oligonucleotide
  Full comp hsa-miR-6084 MIMAT0023709
ccggccaccgactggcggaa

SEQ ID NO: 3796 - DNA, 22 bp, Artificial Sequence
  Synthetic oligonucleotide
  Full comp hsa-miR-4471 MIMAT0018998
ttaaacctctactaagttccca

SEQ ID NO: 3797 - DNA, 21 bp, Artificial Sequence
  Synthetic oligonucleotide
  Full comp hsa-miR-212-3p MIMAT0000269
ggccgtgactggagactgtta

SEQ ID NO: 3798 - DNA, 22 bp, Artificial Sequence
  Synthetic oligonucleotide
  Full comp hsa-miR-585-5p MIMAT0026618
tctgggcgtatctgtgtgctag

SEQ ID NO: 3799 - DNA, 19 bp, Artificial Sequence
  Synthetic oligonucleotide
  Full comp hsa-miR-1224-5p MIMAT0005458
ccacctcccgagtcctcac

SEQ ID NO: 3800 - DNA, 22 bp, Artificial Sequence
  Synthetic oligonucleotide
  Full comp hsa-miR-4772-5p MIMAT0019926
agtctgcaattttgcctgatca

SEQ ID NO: 3801 - DNA, 21 bp, Artificial Sequence
  Synthetic oligonucleotide
  Full comp hsa-miR-6764-3p MIMAT0027429
ctgtcaaggaaagaccagaga

SEQ ID NO: 3802 - DNA, 22 bp, Artificial Sequence
  Synthetic oligonucleotide
  Full comp hsa-miR-3158-3p MIMAT0015032
gtcctgcagagaggaagccctt

SEQ ID NO: 3803 - DNA, 21 bp, Artificial Sequence
  Synthetic oligonucleotide
  Full comp hsa-miR-4427 MIMAT0018942
actcttcagactctattcaga

SEQ ID NO: 3804 - DNA, 22 bp, Artificial Sequence
  Synthetic oligonucleotide
  Full comp hsa-miR-3913-5p MIMAT0018187
agacatcaagatcagtcccaaa

SEQ ID NO: 3805 - DNA, 21 bp, Artificial Sequence
  Synthetic oligonucleotide
  Full comp hsa-miR-553 MIMAT0003216
aaaacaaaatctcaccgtttt

SEQ ID NO: 3806 - DNA, 22 bp, Artificial Sequence
  Synthetic oligonucleotide
  Full comp hsa-miR-6740-3p MIMAT0027382
ctgtttgggaggagagaagaca

SEQ ID NO: 3807 - DNA, 20 bp, Artificial Sequence
  Synthetic oligonucleotide
  Full comp hsa-miR-568 MIMAT0003232
gtgtgtatacatttatacat

SEQ ID NO: 3808 - DNA, 22 bp, Artificial Sequence
  Synthetic oligonucleotide
  Full comp hsa-miR-3714 MIMAT0018165
acaggggagcactgctgccttc

SEQ ID NO: 3809 - DNA, 22 bp, Artificial Sequence
  Synthetic oligonucleotide
  Full comp hsa-miR-592 MIMAT0003260
acatcatcgcatattgacacaa

SEQ ID NO: 3810 - DNA, 22 bp, Artificial Sequence
  Synthetic oligonucleotide
  Full comp hsa-miR-6741-5p MIMAT0027383
cacggctcccaccagcacccac

SEQ ID NO: 3811 - DNA, 25 bp, Artificial Sequence
  Synthetic oligonucleotide
  Full comp hsa-miR-3189-5p MIMAT0019217
tcctacccagggcacagatggggca

SEQ ID NO: 3812 - DNA, 22 bp, Artificial Sequence
  Synthetic oligonucleotide
  Full comp hsa-miR-3616-5p MIMAT0017995
acatatcatgagtgcacttcat

SEQ ID NO: 3813 - DNA, 22 bp, Artificial Sequence
  Synthetic oligonucleotide
  Full comp hsa-miR-6753-5p MIMAT0027406
tcagccctgctctgccctggtg

SEQ ID NO: 3814 - DNA, 21 bp, Artificial Sequence
  Synthetic oligonucleotide
  Full comp hsa-miR-940 MIMAT0004983
ggggagcgggggccctgcctt

SEQ ID NO: 3815 - DNA, 22 bp, Artificial Sequence
  Synthetic oligonucleotide
  Full comp hsa-miR-33b-3p MIMAT0004811
gggctgcactgccgaggcactg

SEQ ID NO: 3816 - DNA, 23 bp, Artificial Sequence
  Synthetic oligonucleotide
  Full comp hsa-miR-4668-3p MIMAT0019746
ctggaaaaacaaaaaggattttc

SEQ ID NO: 3817 - DNA, 21 bp, Artificial Sequence
  Synthetic oligonucleotide
  Full comp hsa-miR-588 MIMAT0003255
gttctaacccattgtggccaa

SEQ ID NO: 3818 - DNA, 21 bp, Artificial Sequence
  Synthetic oligonucleotide
  Full comp hsa-miR-1251-5p MIMAT0005903
agcgcctttggcagctagagt

SEQ ID NO: 3819 - DNA, 23 bp, Artificial Sequence
  Synthetic oligonucleotide
  Full comp hsa-miR-8078 MIMAT0031005
gagtctctcaccgggcctagacc

SEQ ID NO: 3820 - DNA, 18 bp, Artificial Sequence
  Synthetic oligonucleotide
  Full comp hsa-miR-5703 MIMAT0022496
accttcccgacttctcct

SEQ ID NO: 3821 - DNA, 22 bp, Artificial Sequence
  Synthetic oligonucleotide
  Full comp hsa-miR-146a-3p MIMAT0004608
ctgaagaactgaatttcagagg

SEQ ID NO: 3822 - DNA, 25 bp, Artificial Sequence
  Synthetic oligonucleotide
  Full comp hsa-miR-449c-5p MIMAT0010251
acagccgctagcaatacactgccta

SEQ ID NO: 3823 - DNA, 23 bp, Artificial Sequence
  Synthetic oligonucleotide
  Full comp hsa-miR-5087 MIMAT0021079
catgccagcaaagctacaaaccc

SEQ ID NO: 3824 - DNA, 21 bp, Artificial Sequence
  Synthetic oligonucleotide
  Full comp hsa-miR-6800-3p MIMAT0027501
ggggcgatgccaggagaggtg

SEQ ID NO: 3825 - DNA, 22 bp, Artificial Sequence
  Synthetic oligonucleotide
  Full comp hsa-miR-3913-3p MIMAT0019225
tttgggactgatcttgatgtct

SEQ ID NO: 3826 - DNA, 22 bp, Artificial Sequence
  Synthetic oligonucleotide
  Full comp hsa-miR-6814-3p MIMAT0027529
ctgccaagggaaggatgcgagt

SEQ ID NO: 3827 - DNA, 20 bp, Artificial Sequence
  Synthetic oligonucleotide
  Full comp hsa-miR-1292-3p MIMAT0022948
gaacgggagccggggcgcga

SEQ ID NO: 3828 - DNA, 22 bp, Artificial Sequence
  Synthetic oligonucleotide
  Full comp hsa-miR-6735-3p MIMAT0027372
ctgagggaggagccacaggcct

SEQ ID NO: 3829 - DNA, 20 bp, Artificial Sequence
  Synthetic oligonucleotide
  Full comp hsa-miR-548av-3p MIMAT0022304
gcaaaagtaactgcagtttt

SEQ ID NO: 3830 - DNA, 19 bp, Artificial Sequence
  Synthetic oligonucleotide
  Full comp hsa-miR-5701 MIMAT0022494
aatcagaacgtgacaataa

SEQ ID NO: 3831 - DNA, 22 bp, Artificial Sequence
  Synthetic oligonucleotide
  Full comp hsa-miR-450b-3p MIMAT0004910
tatggatgcaaaatgatcccaa

SEQ ID NO: 3832 - DNA, 21 bp, Artificial Sequence
  Synthetic oligonucleotide
  Full comp hsa-miR-7847-3p MIMAT0030422
gcctcctcctcgtcctccacg

SEQ ID NO: 3833 - DNA, 17 bp, Artificial Sequence
  Synthetic oligonucleotide
  Full comp hsa-miR-4497 MIMAT0019032
gcccagccgtcccggag

SEQ ID NO: 3834 - DNA, 23 bp, Artificial Sequence
  Synthetic oligonucleotide
  Full comp hsa-miR-3187-5p MIMAT0019216
ccttcagccacacgctgcccagg

SEQ ID NO: 3835 - DNA, 19 bp, Artificial Sequence
  Synthetic oligonucleotide
  Full comp hsa-miR-6820-5p MIMAT0027540
tgaccccagctctgccgca

SEQ ID NO: 3836 - DNA, 21 bp, Artificial Sequence
  Synthetic oligonucleotide
  Full comp hsa-miR-1181 MIMAT0005826
cggctcgggtggcggcgacgg

SEQ ID NO: 3837 - DNA, 22 bp, Artificial Sequence
  Synthetic oligonucleotide
  Full comp hsa-miR-3121-3p MIMAT0014983
tgtcctttgcctactctattta

SEQ ID NO: 3838 - DNA, 22 bp, Artificial Sequence
  Synthetic oligonucleotide
  Full comp hsa-miR-8058 MIMAT0030985
ttatggcaagatcaaagtccag

SEQ ID NO: 3839 - DNA, 22 bp, Artificial Sequence
  Synthetic oligonucleotide
  Full comp hsa-miR-452-5p MIMAT0001635
tcagtttcctctgcaaacagtt

SEQ ID NO: 3840 - DNA, 22 bp, Artificial Sequence
  Synthetic oligonucleotide
  Full comp hsa-miR-642a-5p MIMAT0003312
caagacacatttggagagggac

SEQ ID NO: 3841 - DNA, 21 bp, Artificial Sequence
  Synthetic oligonucleotide
  Full comp hsa-miR-1204 MIMAT0005868
ataatggagaccaggccacga

SEQ ID NO: 3842 - DNA, 22 bp, Artificial Sequence
  Synthetic oligonucleotide
  Full comp hsa-miR-6753-3p MIMAT0027407
gtgccagggcagagacagacca

SEQ ID NO: 3843 - DNA, 22 bp, Artificial Sequence
  Synthetic oligonucleotide
  Full comp hsa-miR-3156-5p MIMAT0015030
tgtctcccacttccagatcttt

SEQ ID NO: 3844 - DNA, 22 bp, Artificial Sequence
  Synthetic oligonucleotide
  Full comp hsa-miR-363-5p MIMAT0003385
aaattgcatcgtgatccacccg

SEQ ID NO: 3845 - DNA, 22 bp, Artificial Sequence
  Synthetic oligonucleotide
  Full comp hsa-miR-7851-3p MIMAT0030426
tccaacctcagtctcccaggta

SEQ ID NO: 3846 - DNA, 22 bp, Artificial Sequence
  Synthetic oligonucleotide
  Full comp hsa-miR-3152-3p MIMAT0015025
ttattgcccctattctaacaca

SEQ ID NO: 3847 - DNA, 21 bp, Artificial Sequence
  Synthetic oligonucleotide
  Full comp hsa-miR-520e MIMAT0002825
ccctcaaaaaggaagcacttt

SEQ ID NO: 3848 - DNA, 21 bp, Artificial Sequence
  Synthetic oligonucleotide
  Full comp hsa-miR-607 MIMAT0003275
gttatagatctggatttgaac

SEQ ID NO: 3849 - DNA, 22 bp, Artificial Sequence
  Synthetic oligonucleotide
  Full comp hsa-miR-6783-5p MIMAT0027466
ccggatcaggacttttccccta

SEQ ID NO: 3850 - DNA, 22 bp, Artificial Sequence
  Synthetic oligonucleotide
  Full comp hsa-miR-520c-5p MIMAT0005455
cagaaagtgcttccctctagag

SEQ ID NO: 3851 - DNA, 21 bp, Artificial Sequence
  Synthetic oligonucleotide
  Full comp hsa-miR-4766-5p MIMAT0019917
aacaccaactgctctttcaga

SEQ ID NO: 3852 - DNA, 22 bp, Artificial Sequence
  Synthetic oligonucleotide
  Full comp hsa-miR-580-3p MIMAT0003245
cctaatgattcatcattctcaa

SEQ ID NO: 3853 - DNA, 22 bp, Artificial Sequence
  Synthetic oligonucleotide
  Full comp hsa-miR-4716-3p MIMAT0019827
tctccatgtttccttccccctt

SEQ ID NO: 3854 - DNA, 22 bp, Artificial Sequence
  Synthetic oligonucleotide
  Full comp hsa-miR-6881-5p MIMAT0027662
tgaccctcctatccttacccca

SEQ ID NO: 3855 - DNA, 21 bp, Artificial Sequence
  Synthetic oligonucleotide
  Full comp hsa-miR-25-5p MIMAT0004498
caattgcccaagtctccgcct

SEQ ID NO: 3856 - DNA, 17 bp, Artificial Sequence
  Synthetic oligonucleotide
  Full comp hsa-miR-3178 MIMAT0015055
cgatccggccgcgcccc

SEQ ID NO: 3857 - DNA, 22 bp, Artificial Sequence
  Synthetic oligonucleotide
  Full comp hsa-miR-548b-3p MIMAT0003254
acaaaagcaactgaggttcttg

SEQ ID NO: 3858 - DNA, 20 bp, Artificial Sequence
  Synthetic oligonucleotide
  Full comp hsa-miR-4651 MIMAT0019715
gcccgacctcacccaccccg

SEQ ID NO: 3859 - DNA, 22 bp, Artificial Sequence
  Synthetic oligonucleotide
  Full comp hsa-miR-4798-5p MIMAT0019974
ccaattcacaaagtataccgaa

SEQ ID NO: 3860 - DNA, 22 bp, Artificial Sequence
  Synthetic oligonucleotide
  Full comp hsa-miR-148a-5p MIMAT0004549
agtcggagtgtctcagaacttt

SEQ ID NO: 3861 - DNA, 22 bp, Artificial Sequence
  Synthetic oligonucleotide
  Full comp hsa-miR-4781-3p MIMAT0019943
ctctagcgaggattccaacatt

SEQ ID NO: 3862 - DNA, 22 bp, Artificial Sequence
  Synthetic oligonucleotide
  Full comp hsa-miR-4538 MIMAT0019081
tcagcccagctcatccaagctc

SEQ ID NO: 3863 - DNA, 22 bp, Artificial Sequence
  Synthetic oligonucleotide
  Full comp hsa-miR-6722-3p MIMAT0025854
cctggcccacccgacccctgca

SEQ ID NO: 3864 - DNA, 22 bp, Artificial Sequence
  Synthetic oligonucleotide
  Full comp hsa-miR-4716-5p MIMAT0019826
agaagggggaaggaaacatgga

SEQ ID NO: 3865 - DNA, 23 bp, Artificial Sequence
  Synthetic oligonucleotide
  Full comp hsa-miR-3973 MIMAT0019358
ctaaggctaatgctgtactttgt

SEQ ID NO: 3866 - DNA, 22 bp, Artificial Sequence
  Synthetic oligonucleotide
  Full comp hsa-miR-99b-5p MIMAT0000689
cgcaaggtcggttctacgggtg

SEQ ID NO: 3867 - DNA, 21 bp, Artificial Sequence
  Synthetic oligonucleotide
  Full comp hsa-miR-548au-5p MIMAT0022291
gcaaaaaccgcaattactttt

SEQ ID NO: 3868 - DNA, 22 bp, Artificial Sequence
  Synthetic oligonucleotide
  Full comp hsa-miR-494-3p MIMAT0002816
gaggtttcccgtgtatgtttca

SEQ ID NO: 3869 - DNA, 22 bp, Artificial Sequence
  Synthetic oligonucleotide
  Full comp hsa-miR-452-3p MIMAT0001636
cacttacttctttgcagatgag

SEQ ID NO: 3870 - DNA, 22 bp, Artificial Sequence
  Synthetic oligonucleotide
  Full comp hsa-miR-19b-2-5p MIMAT0004492
tgaaatgcaaacctgcaaaact

SEQ ID NO: 3871 - DNA, 22 bp, Artificial Sequence
  Synthetic oligonucleotide
  Full comp hsa-miR-221-5p MIMAT0004568
aaatctacattgtatgccaggt

SEQ ID NO: 3872 - DNA, 21 bp, Artificial Sequence
  Synthetic oligonucleotide
  Full comp hsa-miR-4322 MIMAT0016873
ccccacgcgctgagcccacag

SEQ ID NO: 3873 - DNA, 21 bp, Artificial Sequence
  Synthetic oligonucleotide
  Full comp hsa-miR-6780a-3p MIMAT0027461
ctaggaaagaaaacagaggag

SEQ ID NO: 3874 - DNA, 19 bp, Artificial Sequence
  Synthetic oligonucleotide
  Full comp hsa-miR-4329 MIMAT0016923
gtggaactagggtctcagg

SEQ ID NO: 3875 - DNA, 21 bp, Artificial Sequence
  Synthetic oligonucleotide
  Full comp hsa-miR-548at-3p MIMAT0022278
acaaaagttactgcggttttg

SEQ ID NO: 3876 - DNA, 22 bp, Artificial Sequence
  Synthetic oligonucleotide
  Full comp hsa-miR-4704-3p MIMAT0019804
tagacactagatatgtgactga

SEQ ID NO: 3877 - DNA, 22 bp, Artificial Sequence
  Synthetic oligonucleotide
  Full comp hsa-miR-3664-3p MIMAT0019220
aactctgtctttactcctgaga

SEQ ID NO: 3878 - DNA, 20 bp, Artificial Sequence
  Synthetic oligonucleotide
  Full comp hsa-miR-4648 MIMAT0019710
ctcccatttgcagtcccaca

SEQ ID NO: 3879 - DNA, 22 bp, Artificial Sequence
  Synthetic oligonucleotide
  Full comp hsa-let-7f-2-3p MIMAT0004487
ggaaagacagtagactgtatag

SEQ ID NO: 3880 - DNA, 21 bp, Artificial Sequence
  Synthetic oligonucleotide
  Full comp hsa-miR-551a MIMAT0003214
tggaaaccaagagtgggtcgc

SEQ ID NO: 3881 - DNA, 22 bp, Artificial Sequence
  Synthetic oligonucleotide
  Full comp hsa-miR-4749-5p MIMAT0019885
gatgccctggcctgtccccgca

SEQ ID NO: 3882 - DNA, 22 bp, Artificial Sequence
  Synthetic oligonucleotide
  Full comp hsa-miR-7844-5p MIMAT0030419
tacaccacacagtcctagtttt

SEQ ID NO: 3883 - DNA, 22 bp, Artificial Sequence
  Synthetic oligonucleotide
  Full comp hsa-miR-3167 MIMAT0015042
acaccagtatttctgaaatcct

SEQ ID NO: 3884 - DNA, 21 bp, Artificial Sequence
  Synthetic oligonucleotide
  Full comp hsa-miR-1295b-5p MIMAT0022293
attaggccgcagatctgggtg

SEQ ID NO: 3885 - DNA, 22 bp, Artificial Sequence
  Synthetic oligonucleotide
  Full comp hsa-miR-891a-3p MIMAT0026717
ctcacaacaaacatgtgccact

SEQ ID NO: 3886 - DNA, 21 bp, Artificial Sequence
  Synthetic oligonucleotide
  Full comp hsa-miR-215-5p MIMAT0000272
gtctgtcaattcataggtcat

SEQ ID NO: 3887 - DNA, 25 bp, Artificial Sequence
  Synthetic oligonucleotide
  Full comp hsa-miR-1292-5p MIMAT0005943
cagcgtctgccggaacccgttccca

SEQ ID NO: 3888 - DNA, 22 bp, Artificial Sequence
  Synthetic oligonucleotide
  Full comp hsa-miR-4670-3p MIMAT0019751
aagcgaccatgatgtaacttca

SEQ ID NO: 3889 - DNA, 23 bp, Artificial Sequence
  Synthetic oligonucleotide
  Full comp hsa-miR-605-5p MIMAT0003273
aggagaaggcaccatgggattta

SEQ ID NO: 3890 - DNA, 22 bp, Artificial Sequence
  Synthetic oligonucleotide
  Full comp hsa-miR-6806-3p MIMAT0027513
ctgcaggaatgtcagagcttca

SEQ ID NO: 3891 - DNA, 22 bp, Artificial Sequence
  Synthetic oligonucleotide
  Full comp hsa-miR-4720-5p MIMAT0019833
aagttataccaaatatgccagg

SEQ ID NO: 3892 - DNA, 20 bp, Artificial Sequence
  Synthetic oligonucleotide
  Full comp hsa-miR-6758-3p MIMAT0027417
ctggacagaggagaatgagt

SEQ ID NO: 3893 - DNA, 20 bp, Artificial Sequence
  Synthetic oligonucleotide
  Full comp hsa-miR-5684 MIMAT0022473
ctgttgctcaggctagagtt

SEQ ID NO: 3894 - DNA, 22 bp, Artificial Sequence
  Synthetic oligonucleotide
  Full comp hsa-miR-150-5p MIMAT0000451
cactggtacaagggttgggaga

SEQ ID NO: 3895 - DNA, 23 bp, Artificial Sequence
  Synthetic oligonucleotide
  Full comp hsa-miR-361-3p MIMAT0004682
aaatcagaatcacacctggggga

SEQ ID NO: 3896 - DNA, 19 bp, Artificial Sequence
  Synthetic oligonucleotide
  Full comp hsa-miR-6133 MIMAT0024617
tacccaacctcctccctca

SEQ ID NO: 3897 - DNA, 22 bp, Artificial Sequence
  Synthetic oligonucleotide
  Full comp hsa-miR-4446-3p MIMAT0018965
acccatgtcactgccagccctg

SEQ ID NO: 3898 - DNA, 18 bp, Artificial Sequence
  Synthetic oligonucleotide
  Full comp hsa-miR-4281 MIMAT0016907
cccccctccccgggaccc

SEQ ID NO: 3899 - DNA, 22 bp, Artificial Sequence
  Synthetic oligonucleotide
  Full comp hsa-miR-628-5p MIMAT0004809
cctctagtaaatatgtcagcat

SEQ ID NO: 3900 - DNA, 22 bp, Artificial Sequence
  Synthetic oligonucleotide
  Full comp hsa-miR-100-3p MIMAT0004512
catacctatagatacaagcttg

SEQ ID NO: 3901 - DNA, 22 bp, Artificial Sequence
  Synthetic oligonucleotide
  Full comp hsa-miR-3133 MIMAT0014998
attgggttttaagagttcttta

SEQ ID NO: 3902 - DNA, 22 bp, Artificial Sequence
  Synthetic oligonucleotide
  Full comp hsa-miR-4298 MIMAT0016852
ctgcctcctcctcctgtcccag

SEQ ID NO: 3903 - DNA, 20 bp, Artificial Sequence
  Synthetic oligonucleotide
  Full comp hsa-miR-6777-3p MIMAT0027455
ctgggggccaggagagtgga

SEQ ID NO: 3904 - DNA, 22 bp, Artificial Sequence
  Synthetic oligonucleotide
  Full comp hsa-miR-6759-5p MIMAT0027418
acagacttctgcccacccacaa

SEQ ID NO: 3905 - DNA, 22 bp, Artificial Sequence
  Synthetic oligonucleotide
  Full comp hsa-miR-323a-5p MIMAT0004696
gcgaacgcgccacggaccacct

SEQ ID NO: 3906 - DNA, 22 bp, Artificial Sequence
  Synthetic oligonucleotide
  Full comp hsa-miR-345-5p MIMAT0000772
gagccctggactaggagtcagc

SEQ ID NO: 3907 - DNA, 20 bp, Artificial Sequence
  Synthetic oligonucleotide
  Full comp hsa-miR-877-5p MIMAT0004949
ccctgcgccatctcctctac

SEQ ID NO: 3908 - DNA, 22 bp, Artificial Sequence
  Synthetic oligonucleotide
  Full comp hsa-miR-5008-5p MIMAT0021039
ccactgtgccccaagggcctca

SEQ ID NO: 3909 - DNA, 22 bp, Artificial Sequence
  Synthetic oligonucleotide
  Full comp hsa-miR-27b-5p MIMAT0004588
gttcaccaatcagctaagctct

SEQ ID NO: 3910 - DNA, 23 bp, Artificial Sequence
  Synthetic oligonucleotide
  Full comp hsa-miR-301b-3p MIMAT0004958
gctttgacaatatcattgcactg

SEQ ID NO: 3911 - DNA, 22 bp, Artificial Sequence
  Synthetic oligonucleotide
  Full comp hsa-miR-5000-3p MIMAT0021020
tccaagttcagaagtgtcctga

SEQ ID NO: 3912 - DNA, 22 bp, Artificial Sequence
  Synthetic oligonucleotide
  Full comp hsa-miR-4776-5p MIMAT0019932
agcccttgccatcctggtccac

SEQ ID NO: 3913 - DNA, 20 bp, Artificial Sequence
  Synthetic oligonucleotide
  Full comp hsa-miR-1227-3p MIMAT0005580
ctggggaaaagggtggcacg

SEQ ID NO: 3914 - DNA, 22 bp, Artificial Sequence
  Synthetic oligonucleotide
  Full comp hsa-miR-659-3p MIMAT0003337
tggggaccctccctgaaccaag

SEQ ID NO: 3915 - DNA, 22 bp, Artificial Sequence
  Synthetic oligonucleotide
  Full comp hsa-miR-92a-2-5p MIMAT0004508
gtaatgcaacaaatccccaccc

SEQ ID NO: 3916 - DNA, 23 bp, Artificial Sequence
  Synthetic oligonucleotide
  Full comp hsa-miR-6813-5p MIMAT0027526
agaacctgaaaccccagcccctg

SEQ ID NO: 3917 - DNA, 22 bp, Artificial Sequence
  Synthetic oligonucleotide
  Full comp hsa-miR-1256 MIMAT0005907
agctagtgagaagtcaatgcct

SEQ ID NO: 3918 - DNA, 23 bp, Artificial Sequence
  Synthetic oligonucleotide
  Full comp hsa-miR-105-5p MIMAT0000102
accacaggagtctgagcatttga

SEQ ID NO: 3919 - DNA, 22 bp, Artificial Sequence
  Synthetic oligonucleotide
  Full comp hsa-miR-4755-3p MIMAT0019896
actttcccttcagagcctggct

SEQ ID NO: 3920 - DNA, 21 bp, Artificial Sequence
  Synthetic oligonucleotide
  Full comp hsa-miR-640 MIMAT0003310
agaggcaggttcctggatcat

SEQ ID NO: 3921 - DNA, 22 bp, Artificial Sequence
  Synthetic oligonucleotide
  Full comp hsa-miR-199a-3p MIMAT0000232
taaccaatgtgcagactactgt

SEQ ID NO: 3922 - DNA, 21 bp, Artificial Sequence
  Synthetic oligonucleotide
  Full comp hsa-miR-1224-3p MIMAT0005459
ctgaggagagaggaggtgggg

SEQ ID NO: 3923 - DNA, 22 bp, Artificial Sequence
  Synthetic oligonucleotide
  Full comp hsa-miR-30d-3p MIMAT0004551
gcagcaaacatctgactgaaag

SEQ ID NO: 3924 - DNA, 21 bp, Artificial Sequence
  Synthetic oligonucleotide
  Full comp hsa-miR-1307-5p MIMAT0022727
agccggtcgaggtccggtcga

SEQ ID NO: 3925 - DNA, 22 bp, Artificial Sequence
  Synthetic oligonucleotide
  Full comp hsa-miR-32-3p MIMAT0004505
aaatatcacacacactaaattg

SEQ ID NO: 3926 - DNA, 17 bp, Artificial Sequence
  Synthetic oligonucleotide
  Full comp hsa-miR-4500 MIMAT0019036
aagaaactactacctca

SEQ ID NO: 3927 - DNA, 18 bp, Artificial Sequence
  Synthetic oligonucleotide
  Full comp hsa-miR-4273 MIMAT0016903
ctgtccatcagagaacac

SEQ ID NO: 3928 - DNA, 22 bp, Artificial Sequence
  Synthetic oligonucleotide
  Full comp hsa-miR-525-3p MIMAT0002839
cgctctaaagggaagcgccttc

SEQ ID NO: 3929 - DNA, 23 bp, Artificial Sequence
  Synthetic oligonucleotide
  Full comp hsa-miR-708-5p MIMAT0004926
cccagctagattgtaagctcctt

SEQ ID NO: 3930 - DNA, 21 bp, Artificial Sequence
  Synthetic oligonucleotide
  Full comp hsa-miR-488-3p MIMAT0004763
gaccaagaaatagcctttcaa

SEQ ID NO: 3931 - DNA, 18 bp, Artificial Sequence
  Synthetic oligonucleotide
  Full comp hsa-miR-4466 MIMAT0018993
ccccgccggcccgcaccc

SEQ ID NO: 3932 - DNA, 22 bp, Artificial Sequence
  Synthetic oligonucleotide
  Full comp hsa-miR-2467-3p MIMAT0019953
cctgagcctctctgcctctgct

SEQ ID NO: 3933 - DNA, 22 bp, Artificial Sequence
  Synthetic oligonucleotide
  Full comp hsa-miR-6764-5p MIMAT0027428
caactctgaccagaccctggga

SEQ ID NO: 3934 - DNA, 23 bp, Artificial Sequence
  Synthetic oligonucleotide
  Full comp hsa-miR-3928-5p MIMAT0027037
gcaggcggaaccttagagcttca

SEQ ID NO: 3935 - DNA, 22 bp, Artificial Sequence
  Synthetic oligonucleotide
  Full comp hsa-miR-548y MIMAT0018354
ggcaaaaacagtgattactttt

SEQ ID NO: 3936 - DNA, 22 bp, Artificial Sequence
  Synthetic oligonucleotide
  Full comp hsa-miR-3914 MIMAT0018188
acttctcattttctggttcctt

SEQ ID NO: 3937 - DNA, 22 bp, Artificial Sequence
  Synthetic oligonucleotide
  Full comp hsa-miR-34a-5p MIMAT0000255
acaaccagctaagacactgcca

SEQ ID NO: 3938 - DNA, 23 bp, Artificial Sequence
  Synthetic oligonucleotide
  Full comp hsa-miR-335-5p MIMAT0000765
acatttttcgttattgctcttga

SEQ ID NO: 3939 - DNA, 22 bp, Artificial Sequence
  Synthetic oligonucleotide
  Full comp hsa-miR-711 MIMAT0012734
cttacgtctctccctgggtccc

SEQ ID NO: 3940 - DNA, 19 bp, Artificial Sequence
  Synthetic oligonucleotide
  Full comp hsa-miR-5588-3p MIMAT0022296
gctggcattagtgggactt

SEQ ID NO: 3941 - DNA, 19 bp, Artificial Sequence
  Synthetic oligonucleotide
  Full comp hsa-miR-6848-3p MIMAT0027597
ctgggggccaagagaccac

SEQ ID NO: 3942 - DNA, 21 bp, Artificial Sequence
  Synthetic oligonucleotide
  Full comp hsa-miR-6769a-5p MIMAT0027438
agggctcctccatacccacct

SEQ ID NO: 3943 - DNA, 23 bp, Artificial Sequence
  Synthetic oligonucleotide
  Full comp hsa-miR-5091 MIMAT0021083
cagcacagtcttgtcgtctccgt

SEQ ID NO: 3944 - DNA, 22 bp, Artificial Sequence
  Synthetic oligonucleotide
  Full comp hsa-miR-26a-5p MIMAT0000082
agcctatcctggattacttgaa

SEQ ID NO: 3945 - DNA, 22 bp, Artificial Sequence
  Synthetic oligonucleotide
  Full comp hsa-miR-99b-3p MIMAT0004678
cggacccacagacacgagcttg

SEQ ID NO: 3946 - DNA, 24 bp, Artificial Sequence
  Synthetic oligonucleotide
  Full comp hsa-miR-4793-5p MIMAT0019965
cctctgccctgtggagcaggatgt

SEQ ID NO: 3947 - DNA, 22 bp, Artificial Sequence
  Synthetic oligonucleotide
  Full comp hsa-miR-6819-5p MIMAT0027538
gctccttggccctccaccccaa

SEQ ID NO: 3948 - DNA, 21 bp, Artificial Sequence
  Synthetic oligonucleotide
  Full comp hsa-miR-6747-3p MIMAT0027395
ctggtgcagaggaaggcagga

SEQ ID NO: 3949 - DNA, 22 bp, Artificial Sequence
  Synthetic oligonucleotide
  Full comp hsa-miR-190a-5p MIMAT0000458
acctaatatatcaaacatatca

SEQ ID NO: 3950 - DNA, 21 bp, Artificial Sequence
  Synthetic oligonucleotide
  Full comp hsa-miR-7109-5p MIMAT0028115
agcagggtctcctccccccag

SEQ ID NO: 3951 - DNA, 21 bp, Artificial Sequence
  Synthetic oligonucleotide
  Full comp hsa-miR-6728-3p MIMAT0027358
ctggggagagcagagcagaga

SEQ ID NO: 3952 - DNA, 23 bp, Artificial Sequence
  Synthetic oligonucleotide
  Full comp hsa-miR-4647 MIMAT0019709
ttcctcagcacagcaccatcttc

SEQ ID NO: 3953 - DNA, 22 bp, Artificial Sequence
  Synthetic oligonucleotide
  Full comp hsa-miR-3674 MIMAT0018097
ggccaatcttaggttctacaat

SEQ ID NO: 3954 - DNA, 22 bp, Artificial Sequence
  Synthetic oligonucleotide
  Full comp hsa-miR-3165 MIMAT0015039
tgaggtcacattgcatccacct

SEQ ID NO: 3955 - DNA, 22 bp, Artificial Sequence
  Synthetic oligonucleotide
  Full comp hsa-miR-548c-3p MIMAT0003285
gcaaaagtaattgagatttttg

SEQ ID NO: 3956 - DNA, 18 bp, Artificial Sequence
  Synthetic oligonucleotide
  Full comp hsa-miR-4308 MIMAT0016861
aagaagaaactccaggga

SEQ ID NO: 3957 - DNA, 22 bp, Artificial Sequence
  Synthetic oligonucleotide
  Full comp hsa-miR-6731-5p MIMAT0027363
tccacaataccctgctctccca

SEQ ID NO: 3958 - DNA, 21 bp, Artificial Sequence
  Synthetic oligonucleotide
  Full comp hsa-miR-3130-3p MIMAT0014994
ttacccagtctccggtgcagc

SEQ ID NO: 3959 - DNA, 21 bp, Artificial Sequence
  Synthetic oligonucleotide
  Full comp hsa-miR-3666 MIMAT0018088
tcggcatctacacttgcactg

SEQ ID NO: 3960 - DNA, 22 bp, Artificial Sequence
  Synthetic oligonucleotide
  Full comp hsa-miR-4639-5p MIMAT0019697
tcaatctcagcctacttagcaa

SEQ ID NO: 3961 - DNA, 21 bp, Artificial Sequence
  Synthetic oligonucleotide
  Full comp hsa-miR-297 MIMAT0004450
catgcacatgcacacatacat

SEQ ID NO: 3962 - DNA, 23 bp, Artificial Sequence
  Synthetic oligonucleotide
  Full comp hsa-miR-1264 MIMAT0005791
aacaggtgctcaaataagacttg

SEQ ID NO: 3963 - DNA, 22 bp, Artificial Sequence
  Synthetic oligonucleotide
  Full comp hsa-miR-5583-3p MIMAT0022282
ccaaactaatatacccatattc

SEQ ID NO: 3964 - DNA, 23 bp, Artificial Sequence
  Synthetic oligonucleotide
  Full comp hsa-miR-3188 MIMAT0015070
ccccgtatccgcacaaagcctct

SEQ ID NO: 3965 - DNA, 22 bp, Artificial Sequence
  Synthetic oligonucleotide
  Full comp hsa-let-7a-5p MIMAT0000062
aactatacaacctactacctca

SEQ ID NO: 3966 - DNA, 19 bp, Artificial Sequence
  Synthetic oligonucleotide
  Full comp hsa-miR-6080 MIMAT0023705
cgggaacgcccgcactaga

SEQ ID NO: 3967 - DNA, 23 bp, Artificial Sequence
  Synthetic oligonucleotide
  Full comp hsa-miR-7-5p MIMAT0000252
acaacaaaatcactagtcttcca

SEQ ID NO: 3968 - DNA, 23 bp, Artificial Sequence
  Synthetic oligonucleotide
  Full comp hsa-miR-3136-5p MIMAT0015003
aatgaccctacctattcagtcag

SEQ ID NO: 3969 - DNA, 22 bp, Artificial Sequence
  Synthetic oligonucleotide
  Full comp hsa-miR-499a-3p MIMAT0004772
agcacagacttgctgtgatgtt

SEQ ID NO: 3970 - DNA, 22 bp, Artificial Sequence
  Synthetic oligonucleotide
  Full comp hsa-miR-629-3p MIMAT0003298
gctgggcttacgttgggagaac

SEQ ID NO: 3971 - DNA, 21 bp, Artificial Sequence
  Synthetic oligonucleotide
  Full comp hsa-miR-4771 MIMAT0019925
taattgtaggtcaagtctgct

SEQ ID NO: 3972 - DNA, 21 bp, Artificial Sequence
  Synthetic oligonucleotide
  Full comp hsa-miR-518d-3p MIMAT0002864
gctccaaagggaagcgctttg

SEQ ID NO: 3973 - DNA, 23 bp, Artificial Sequence
  Synthetic oligonucleotide
  Full comp hsa-miR-6815-5p MIMAT0027530
aatgactcctccggcgccaccta

SEQ ID NO: 3974 - DNA, 22 bp, Artificial Sequence
  Synthetic oligonucleotide
  Full comp hsa-miR-6746-5p MIMAT0027392
ccaggccacctccttctcccgg

SEQ ID NO: 3975 - DNA, 23 bp, Artificial Sequence
  Synthetic oligonucleotide
  Full comp hsa-miR-6772-3p MIMAT0027445
tgtgggcacagagtcaggagcaa

SEQ ID NO: 3976 - DNA, 22 bp, Artificial Sequence
  Synthetic oligonucleotide
  Full comp hsa-miR-130a-5p MIMAT0004593
gcagacagtagcacaatgtgaa

SEQ ID NO: 3977 - DNA, 23 bp, Artificial Sequence
  Synthetic oligonucleotide
  Full comp hsa-miR-137 MIMAT0000429
ctacgcgtattcttaagcaataa

SEQ ID NO: 3978 - DNA, 22 bp, Artificial Sequence
  Synthetic oligonucleotide
  Full comp hsa-miR-874-3p MIMAT0004911
tcggtccctcgggccagggcag

SEQ ID NO: 3979 - DNA, 21 bp, Artificial Sequence
  Synthetic oligonucleotide
  Full comp hsa-miR-331-3p MIMAT0000760
ttctaggataggcccaggggc

SEQ ID NO: 3980 - DNA, 22 bp, Artificial Sequence
  Synthetic oligonucleotide
  Full comp hsa-miR-187-3p MIMAT0000262
ccggctgcaacacaagacacga

SEQ ID NO: 3981 - DNA, 22 bp, Artificial Sequence
  Synthetic oligonucleotide
  Full comp hsa-miR-3150a-3p MIMAT0015023
ccaacctcgaggatctccccag

SEQ ID NO: 3982 - DNA, 21 bp, Artificial Sequence
  Synthetic oligonucleotide
  Full comp hsa-miR-4433b-3p MIMAT0030414
acgtcccaccccccactcctg

SEQ ID NO: 3983 - DNA, 20 bp, Artificial Sequence
  Synthetic oligonucleotide
  Full comp hsa-miR-924 MIMAT0004974
gcaagacatcacaagactct

SEQ ID NO: 3984 - DNA, 23 bp, Artificial Sequence
  Synthetic oligonucleotide
  Full comp hsa-miR-523-3p MIMAT0002840
accctctatagggaagcgcgttc

SEQ ID NO: 3985 - DNA, 21 bp, Artificial Sequence
  Synthetic oligonucleotide
  Full comp hsa-miR-577 MIMAT0003242
caggtaccaatattttatcta

SEQ ID NO: 3986 - DNA, 23 bp, Artificial Sequence
  Synthetic oligonucleotide
  Full comp hsa-miR-579-3p MIMAT0003244
aatcgcggtttataccaaatgaa

SEQ ID NO: 3987 - DNA, 22 bp, Artificial Sequence
  Synthetic oligonucleotide
  Full comp hsa-miR-382-5p MIMAT0000737
cgaatccaccacgaacaacttc

SEQ ID NO: 3988 - DNA, 18 bp, Artificial Sequence
  Synthetic oligonucleotide
  Full comp hsa-miR-4770 MIMAT0019924
agctacagtgtcatctca

SEQ ID NO: 3989 - DNA, 21 bp, Artificial Sequence
  Synthetic oligonucleotide
  Full comp hsa-miR-8083 MIMAT0031010
agttgcagccgtcaagtcctg

SEQ ID NO: 3990 - DNA, 22 bp, Artificial Sequence
  Synthetic oligonucleotide
  Full comp hsa-miR-218-1-3p MIMAT0004565
ccatggtgcttgacggaaccat

SEQ ID NO: 3991 - DNA, 21 bp, Artificial Sequence
  Synthetic oligonucleotide
  Full comp hsa-miR-6877-3p MIMAT0027655
ggaggccaagggcagaggctg

SEQ ID NO: 3992 - DNA, 20 bp, Artificial Sequence
  Synthetic oligonucleotide
  Full comp hsa-miR-3115 MIMAT0014977
accaactagtaaacccatat

SEQ ID NO: 3993 - DNA, 23 bp, Artificial Sequence
  Synthetic oligonucleotide
  Full comp hsa-miR-4746-5p MIMAT0019880
tctgcaggttctcctgggaccgg

SEQ ID NO: 3994 - DNA, 22 bp, Artificial Sequence
  Synthetic oligonucleotide
  Full comp hsa-miR-5010-3p MIMAT0021044
ctggggaatgggagacacaaaa

SEQ ID NO: 3995 - DNA, 22 bp, Artificial Sequence
  Synthetic oligonucleotide
  Full comp hsa-miR-376a-5p MIMAT0003386
tactcatagaaggagaatctac

SEQ ID NO: 3996 - DNA, 21 bp, Artificial Sequence
  Synthetic oligonucleotide
  Full comp hsa-miR-188-5p MIMAT0000457
ccctccaccatgcaagggatg

SEQ ID NO: 3997 - DNA, 21 bp, Artificial Sequence
  Synthetic oligonucleotide
  Full comp hsa-miR-7978 MIMAT0031181
tgagcaacgctatacaccaga

SEQ ID NO: 3998 - DNA, 20 bp, Artificial Sequence
  Synthetic oligonucleotide
  Full comp hsa-miR-4507 MIMAT0019044
cccagcccagcccaacccag

SEQ ID NO: 3999 - DNA, 22 bp, Artificial Sequence
  Synthetic oligonucleotide
  Full comp hsa-miR-495-3p MIMAT0002817
aagaagtgcaccatgtttgttt

SEQ ID NO: 4000 - DNA, 17 bp, Artificial Sequence
  Synthetic oligonucleotide
  Full comp hsa-miR-4293 MIMAT0016848
ctgttcctgtcaggctg

SEQ ID NO: 4001 - DNA, 17 bp, Artificial Sequence
  Synthetic oligonucleotide
  Full comp hsa-miR-4516 MIMAT0019053
gccccgacccttctccc

SEQ ID NO: 4002 - DNA, 22 bp, Artificial Sequence
  Synthetic oligonucleotide
  Full comp hsa-miR-4475 MIMAT0019002
ataatgaatgcttggtcccttg

SEQ ID NO: 4003 - DNA, 20 bp, Artificial Sequence
  Synthetic oligonucleotide
  Full comp hsa-miR-1910-3p MIMAT0026917
tgtcatcctgcttctgcctc

SEQ ID NO: 4004 - DNA, 22 bp, Artificial Sequence
  Synthetic oligonucleotide
  Full comp hsa-miR-4681 MIMAT0019766
agatacagcctgcattcccgtt

SEQ ID NO: 4005 - DNA, 23 bp, Artificial Sequence
  Synthetic oligonucleotide
  Full comp hsa-miR-152-5p MIMAT0026479
agtcggagtgtatcacagaacct

SEQ ID NO: 4006 - DNA, 22 bp, Artificial Sequence
  Synthetic oligonucleotide
  Full comp hsa-miR-409-3p MIMAT0001639
aggggttcaccgagcaacattc

SEQ ID NO: 4007 - DNA, 22 bp, Artificial Sequence
  Synthetic oligonucleotide
  Full comp hsa-miR-204-5p MIMAT0000265
aggcataggatgacaaagggaa

SEQ ID NO: 4008 - DNA, 22 bp, Artificial Sequence
  Synthetic oligonucleotide
  Full comp hsa-miR-1249-3p MIMAT0005901
tgaagaagggggggaagggcgt

SEQ ID NO: 4009 - DNA, 24 bp, Artificial Sequence
  Synthetic oligonucleotide
  Full comp hsa-miR-4787-3p MIMAT0019957
gcgcggggcagtgggcggcgcatc

SEQ ID NO: 4010 - DNA, 19 bp, Artificial Sequence
  Synthetic oligonucleotide
  Full comp hsa-miR-6071 MIMAT0023696
gccttggccggcagcagaa

SEQ ID NO: 4011 - DNA, 22 bp, Artificial Sequence
  Synthetic oligonucleotide
  Full comp hsa-miR-3920 MIMAT0018195
tcagagagttaagataatcagt

SEQ ID NO: 4012 - DNA, 22 bp, Artificial Sequence
  Synthetic oligonucleotide
  Full comp hsa-miR-6879-5p MIMAT0027658
ctctcccaccttccctgccctg

SEQ ID NO: 4013 - DNA, 21 bp, Artificial Sequence
  Synthetic oligonucleotide
  Full comp hsa-miR-548az-3p MIMAT0025457
gcaaaagtgattgcagttttt

SEQ ID NO: 4014 - DNA, 21 bp, Artificial Sequence
  Synthetic oligonucleotide
  Full comp hsa-miR-6878-3p MIMAT0027657
ctaggagaaagaagaggccag

SEQ ID NO: 4015 - DNA, 22 bp, Artificial Sequence
  Synthetic oligonucleotide
  Full comp hsa-miR-183-5p MIMAT0000261
agtgaattctaccagtgccata

SEQ ID NO: 4016 - DNA, 22 bp, Artificial Sequence
  Synthetic oligonucleotide
  Full comp hsa-miR-544a MIMAT0003164
gaacttgctaaaaatgcagaat

SEQ ID NO: 4017 - DNA, 22 bp, Artificial Sequence
  Synthetic oligonucleotide
  Full comp hsa-miR-135b-3p MIMAT0004698
cccatggcttttagccctacat

SEQ ID NO: 4018 - DNA, 20 bp, Artificial Sequence
  Synthetic oligonucleotide
  Full comp hsa-miR-7973 MIMAT0031176
gtaattattctagggtcaca

SEQ ID NO: 4019 - DNA, 22 bp, Artificial Sequence
  Synthetic oligonucleotide
  Full comp hsa-miR-548ai MIMAT0018989
gggaaaaactgcaattaccttt

SEQ ID NO: 4020 - DNA, 22 bp, Artificial Sequence
  Synthetic oligonucleotide
  Full comp hsa-miR-501-3p MIMAT0004774
agaatccttgcccgggtgcatt

SEQ ID NO: 4021 - DNA, 22 bp, Artificial Sequence
  Synthetic oligonucleotide
  Full comp hsa-miR-4695-5p MIMAT0019788
cctgctcgcccactgcctcctg

SEQ ID NO: 4022 - DNA, 21 bp, Artificial Sequence
  Synthetic oligonucleotide
  Full comp hsa-miR-1251-3p MIMAT0026741
ctacactggctgagcaaagcg

SEQ ID NO: 4023 - DNA, 22 bp, Artificial Sequence
  Synthetic oligonucleotide
  Full comp hsa-miR-4692 MIMAT0019783
atctgatacccacactgcctga

SEQ ID NO: 4024 - DNA, 23 bp, Artificial Sequence
  Synthetic oligonucleotide
  Full comp hsa-miR-103b MIMAT0007402
agcagcattgtacagggctatga

SEQ ID NO: 4025 - DNA, 22 bp, Artificial Sequence
  Synthetic oligonucleotide
  Full comp hsa-miR-548ao-5p MIMAT0021029
tgcaaaaaccgtagttacttct

SEQ ID NO: 4026 - DNA, 18 bp, Artificial Sequence
  Synthetic oligonucleotide
  Full comp hsa-miR-3665 MIMAT0018087
cgccgccccgcacctgct

SEQ ID NO: 4027 - DNA, 21 bp, Artificial Sequence
  Synthetic oligonucleotide
  Full comp hsa-miR-524-3p MIMAT0002850
actccaaagggaagcgccttc

SEQ ID NO: 4028 - DNA, 22 bp, Artificial Sequence
  Synthetic oligonucleotide
  Full comp hsa-miR-214-3p MIMAT0000271
actgcctgtctgtgcctgctgt

SEQ ID NO: 4029 - DNA, 21 bp, Artificial Sequence
  Synthetic oligonucleotide
  Full comp hsa-miR-1197 MIMAT0005955
agaagtagaccatgtgtccta

SEQ ID NO: 4030 - DNA, 18 bp, Artificial Sequence
  Synthetic oligonucleotide
  Full comp hsa-miR-6087 MIMAT0023712
gctcgcccccccgcctca

SEQ ID NO: 4031 - DNA, 19 bp, Artificial Sequence
  Synthetic oligonucleotide
  Full comp hsa-miR-3141 MIMAT0015010
tcctcctccacccgccctc

SEQ ID NO: 4032 - DNA, 21 bp, Artificial Sequence
  Synthetic oligonucleotide
  Full comp hsa-miR-6885-3p MIMAT0027671
ctaggggagcaggaagcaaag

SEQ ID NO: 4033 - DNA, 23 bp, Artificial Sequence
  Synthetic oligonucleotide
  Full comp hsa-miR-346 MIMAT0000773
agaggcaggcatgcgggcagaca

SEQ ID NO: 4034 - DNA, 22 bp, Artificial Sequence
  Synthetic oligonucleotide
  Full comp hsa-miR-21-5p MIMAT0000076
tcaacatcagtctgataagcta

SEQ ID NO: 4035 - DNA, 22 bp, Artificial Sequence
  Synthetic oligonucleotide
  Full comp hsa-miR-197-3p MIMAT0000227
gctgggtggagaaggtggtgaa

SEQ ID NO: 4036 - DNA, 22 bp, Artificial Sequence
  Synthetic oligonucleotide
  Full comp hsa-miR-5582-3p MIMAT0022280
cctaggcacacttaaagtttta

SEQ ID NO: 4037 - DNA, 22 bp, Artificial Sequence
  Synthetic oligonucleotide
  Full comp hsa-miR-4786-5p MIMAT0019954
ggtgcatccagtcctggtctca

SEQ ID NO: 4038 - DNA, 16 bp, Artificial Sequence
  Synthetic oligonucleotide
  Full comp hsa-miR-4485-5p MIMAT0032116
tcactgggcaggcggt

SEQ ID NO: 4039 - DNA, 21 bp, Artificial Sequence
  Synthetic oligonucleotide
  Full comp hsa-miR-205-3p MIMAT0009197
gaacttcactccactgaaatc

SEQ ID NO: 4040 - DNA, 22 bp, Artificial Sequence
  Synthetic oligonucleotide
  Full comp hsa-miR-513c-5p MIMAT0005789
ataaacgacacctccttgagaa

SEQ ID NO: 4041 - DNA, 21 bp, Artificial Sequence
  Synthetic oligonucleotide
  Full comp hsa-miR-8066 MIMAT0030993
tacatccaaaagatcacattg

SEQ ID NO: 4042 - DNA, 23 bp, Artificial Sequence
  Synthetic oligonucleotide
  Full comp hsa-miR-145-5p MIMAT0000437
agggattcctgggaaaactggac

SEQ ID NO: 4043 - DNA, 22 bp, Artificial Sequence
  Synthetic oligonucleotide
  Full comp hsa-miR-5693 MIMAT0022486
gagttcatttcagagccactgc

SEQ ID NO: 4044 - DNA, 22 bp, Artificial Sequence
  Synthetic oligonucleotide
  Full comp hsa-miR-4801 MIMAT0019980
tgagccttggttttcttgtgta

SEQ ID NO: 4045 - DNA, 22 bp, Artificial Sequence
  Synthetic oligonucleotide
  Full comp hsa-miR-4780 MIMAT0019939
gctagggatcaggctcaagggt

SEQ ID NO: 4046 - DNA, 22 bp, Artificial Sequence
  Synthetic oligonucleotide
  Full comp hsa-miR-3935 MIMAT0018350
gtggctggtgctcgtatctaca

SEQ ID NO: 4047 - DNA, 23 bp, Artificial Sequence
  Synthetic oligonucleotide
  Full comp hsa-miR-602 MIMAT0003270
gggccgcagctgtcgcccgtgtc

SEQ ID NO: 4048 - DNA, 21 bp, Artificial Sequence
  Synthetic oligonucleotide
  Full comp hsa-miR-2355-5p MIMAT0016895
ttgtccattgtatctggggat

SEQ ID NO: 4049 - DNA, 24 bp, Artificial Sequence
  Synthetic oligonucleotide
  Full comp hsa-miR-8065 MIMAT0030992
agccaaaattcaactgttcctaca

SEQ ID NO: 4050 - DNA, 19 bp, Artificial Sequence
  Synthetic oligonucleotide
  Full comp hsa-miR-4252 MIMAT0016886
tggtgctgactcagtggcc

SEQ ID NO: 4051 - DNA, 20 bp, Artificial Sequence
  Synthetic oligonucleotide
  Full comp hsa-miR-4768-3p MIMAT0019921
attctctctggatctcctgg

SEQ ID NO: 4052 - DNA, 21 bp, Artificial Sequence
  Synthetic oligonucleotide
  Full comp hsa-miR-552-5p MIMAT0026615
ccaacaggcaaaaggttaaac

SEQ ID NO: 4053 - DNA, 19 bp, Artificial Sequence
  Synthetic oligonucleotide
  Full comp hsa-miR-668-5p MIMAT0026636
catgctcacccgaggcgca

SEQ ID NO: 4054 - DNA, 22 bp, Artificial Sequence
  Synthetic oligonucleotide
  Full comp hsa-miR-5582-5p MIMAT0022279
gctataactttaagtgtgccta

SEQ ID NO: 4055 - DNA, 20 bp, Artificial Sequence
  Synthetic oligonucleotide
  Full comp hsa-miR-6124 MIMAT0024597
tcctcccccttccttttccc

SEQ ID NO: 4056 - DNA, 20 bp, Artificial Sequence
  Synthetic oligonucleotide
  Full comp hsa-miR-4453 MIMAT0018975
aaccgctacagaccaagctc

SEQ ID NO: 4057 - DNA, 22 bp, Artificial Sequence
  Synthetic oligonucleotide
  Full comp hsa-miR-3689b-3p MIMAT0018181
accacaatatcacacctcccag

SEQ ID NO: 4058 - DNA, 22 bp, Artificial Sequence
  Synthetic oligonucleotide
  Full comp hsa-miR-433-3p MIMAT0001627
acaccgaggagcccatcatgat

SEQ ID NO: 4059 - DNA, 22 bp, Artificial Sequence
  Synthetic oligonucleotide
  Full comp hsa-miR-187-5p MIMAT0004561
gcccgggtcctgtgttgtagcc

SEQ ID NO: 4060 - DNA, 22 bp, Artificial Sequence
  Synthetic oligonucleotide
  Full comp hsa-miR-1293 MIMAT0005883
gcacaaatctccagaccaccca

SEQ ID NO: 4061 - DNA, 20 bp, Artificial Sequence
  Synthetic oligonucleotide
  Full comp hsa-miR-613 MIMAT0003281
ggcaaagaaggaacattcct

SEQ ID NO: 4062 - DNA, 22 bp, Artificial Sequence
  Synthetic oligonucleotide
  Full comp hsa-miR-6830-5p MIMAT0027560
gatgtccagcctccttccttgg

SEQ ID NO: 4063 - DNA, 20 bp, Artificial Sequence
  Synthetic oligonucleotide
  Full comp hsa-miR-4749-3p MIMAT0019886
ctgtgggggcaggaggggcg

SEQ ID NO: 4064 - DNA, 22 bp, Artificial Sequence
  Synthetic oligonucleotide
  Full comp hsa-miR-1225-3p MIMAT0005573
ctgggggcggcacaggggctca

SEQ ID NO: 4065 - DNA, 22 bp, Artificial Sequence
  Synthetic oligonucleotide
  Full comp hsa-miR-4643 MIMAT0019703
ttagcatttatggtcatgtgtc

SEQ ID NO: 4066 - DNA, 20 bp, Artificial Sequence
  Synthetic oligonucleotide
  Full comp hsa-miR-6850-3p MIMAT0027601
agtgcggcgttccggccggg

SEQ ID NO: 4067 - DNA, 23 bp, Artificial Sequence
  Synthetic oligonucleotide
  Full comp hsa-miR-302d-3p MIMAT0000718
acactcaaacatggaagcactta

SEQ ID NO: 4068 - DNA, 22 bp, Artificial Sequence
  Synthetic oligonucleotide
  Full comp hsa-miR-210-3p MIMAT0000267
tcagccgctgtcacacgcacag

SEQ ID NO: 4069 - DNA, 23 bp, Artificial Sequence
  Synthetic oligonucleotide
  Full comp hsa-miR-6762-5p MIMAT0027424
acacaggctgctccatggccccg

SEQ ID NO: 4070 - DNA, 21 bp, Artificial Sequence
  Synthetic oligonucleotide
  Full comp hsa-miR-3177-3p MIMAT0015054
acgtgtccccagtgccgtgca

SEQ ID NO: 4071 - DNA, 22 bp, Artificial Sequence
  Synthetic oligonucleotide
  Full comp hsa-miR-4687-5p MIMAT0019774
tttgggtgcgggaggagggctg

SEQ ID NO: 4072 - DNA, 23 bp, Artificial Sequence
  Synthetic oligonucleotide
  Full comp hsa-miR-2682-5p MIMAT0013517
gacgtctgaacagtcactgcctg

SEQ ID NO: 4073 - DNA, 22 bp, Artificial Sequence
  Synthetic oligonucleotide
  Full comp hsa-miR-520f-3p MIMAT0002830
aaccctctaaaaggaagcactt

SEQ ID NO: 4074 - DNA, 21 bp, Artificial Sequence
  Synthetic oligonucleotide
  Full comp hsa-miR-656-5p MIMAT0026627
tgaacacctcacaggcaacct

SEQ ID NO: 4075 - DNA, 23 bp, Artificial Sequence
  Synthetic oligonucleotide
  Full comp hsa-miR-5197-3p MIMAT0021131
attcgatgactcagtctcttctt

SEQ ID NO: 4076 - DNA, 22 bp, Artificial Sequence
  Synthetic oligonucleotide
  Full comp hsa-miR-487a-3p MIMAT0002178
aactggatgtccctgtatgatt

SEQ ID NO: 4077 - DNA, 22 bp, Artificial Sequence
  Synthetic oligonucleotide
  Full comp hsa-miR-30d-5p MIMAT0000245
cttccagtcggggatgtttaca

SEQ ID NO: 4078 - DNA, 18 bp, Artificial Sequence
  Synthetic oligonucleotide
  Full comp hsa-miR-548av-5p MIMAT0022303
aaatccgcaagtactttt

SEQ ID NO: 4079 - DNA, 21 bp, Artificial Sequence
  Synthetic oligonucleotide
  Full comp hsa-miR-6827-3p MIMAT0027555
ctggggaacagaagagacggt

SEQ ID NO: 4080 - DNA, 22 bp, Artificial Sequence
  Synthetic oligonucleotide
  Full comp hsa-miR-518d-5p MIMAT0005456
cagaaagtgcttccctctagag

SEQ ID NO: 4081 - DNA, 24 bp, Artificial Sequence
  Synthetic oligonucleotide
  Full comp hsa-miR-637 MIMAT0003307
acgcagagcccgaaagcccccagt

SEQ ID NO: 4082 - DNA, 22 bp, Artificial Sequence
  Synthetic oligonucleotide
  Full comp hsa-miR-4740-5p MIMAT0019869
cctgcccgagaggatcagtcct

SEQ ID NO: 4083 - DNA, 21 bp, Artificial Sequence
  Synthetic oligonucleotide
  Full comp hsa-miR-7108-5p MIMAT0028113
ccacccgcctgccggccacac

SEQ ID NO: 4084 - DNA, 23 bp, Artificial Sequence
  Synthetic oligonucleotide
  Full comp hsa-miR-6887-5p MIMAT0027674
tgtcctctccatctgtcccccca

SEQ ID NO: 4085 - DNA, 21 bp, Artificial Sequence
  Synthetic oligonucleotide
  Full comp hsa-miR-520b MIMAT0002843
ccctctaaaaggaagcacttt

SEQ ID NO: 4086 - DNA, 23 bp, Artificial Sequence
  Synthetic oligonucleotide
  Full comp hsa-miR-3690 MIMAT0018119
ctttgtctacgctgggtccaggt

SEQ ID NO: 4087 - DNA, 23 bp, Artificial Sequence
  Synthetic oligonucleotide
  Full comp hsa-miR-34b-5p MIMAT0000685
caatcagctaatgacactgccta

SEQ ID NO: 4088 - DNA, 23 bp, Artificial Sequence
  Synthetic oligonucleotide
  Full comp hsa-miR-6786-3p MIMAT0027473
aggcagaatcagaaggggcgtca

SEQ ID NO: 4089 - DNA, 22 bp, Artificial Sequence
  Synthetic oligonucleotide
  Full comp hsa-miR-518a-3p MIMAT0002863
tccagcaaagggaagcgctttc

SEQ ID NO: 4090 - DNA, 19 bp, Artificial Sequence
  Synthetic oligonucleotide
  Full comp hsa-miR-645 MIMAT0003315
tcagcagtaccagcctaga

SEQ ID NO: 4091 - DNA, 22 bp, Artificial Sequence
  Synthetic oligonucleotide
  Full comp hsa-miR-3975 MIMAT0019360
gtgaagtagtgcattagcctca

SEQ ID NO: 4092 - DNA, 23 bp, Artificial Sequence
  Synthetic oligonucleotide
  Full comp hsa-miR-17-5p MIMAT0000070
ctacctgcactgtaagcactttg

SEQ ID NO: 4093 - DNA, 20 bp, Artificial Sequence
  Synthetic oligonucleotide
  Full comp hsa-miR-4524b-3p MIMAT0022256
tagcagcatgaacctgtctc

SEQ ID NO: 4094 - DNA, 22 bp, Artificial Sequence
  Synthetic oligonucleotide
  Full comp hsa-miR-6895-3p MIMAT0027691
ctaaggccaagggcgagagaca

SEQ ID NO: 4095 - DNA, 22 bp, Artificial Sequence
  Synthetic oligonucleotide
  Full comp hsa-miR-6873-5p MIMAT0027646
attgccctctgtattccctctg

SEQ ID NO: 4096 - DNA, 21 bp, Artificial Sequence
  Synthetic oligonucleotide
  Full comp hsa-miR-4674 MIMAT0019756
agccgcgcgtcccgagcccag

SEQ ID NO: 4097 - DNA, 22 bp, Artificial Sequence
  Synthetic oligonucleotide
  Full comp hsa-miR-3200-5p MIMAT0017392
accttgtgcgccttctcagatt

SEQ ID NO: 4098 - DNA, 21 bp, Artificial Sequence
  Synthetic oligonucleotide
  Full comp hsa-miR-2909 MIMAT0013863
ccaagagatgttggccctaac

SEQ ID NO: 4099 - DNA, 23 bp, Artificial Sequence
  Synthetic oligonucleotide
  Full comp hsa-miR-4730 MIMAT0019852
tggcatggaatgggctccgccag

SEQ ID NO: 4100 - DNA, 22 bp, Artificial Sequence
  Synthetic oligonucleotide
  Full comp hsa-miR-3681-5p MIMAT0018108
gcacagagtgcatcatccacta

SEQ ID NO: 4101 - DNA, 22 bp, Artificial Sequence
  Synthetic oligonucleotide
  Full comp hsa-miR-6876-5p MIMAT0027652
tgaactgcctgtctccttcctg

SEQ ID NO: 4102 - DNA, 23 bp, Artificial Sequence
  Synthetic oligonucleotide
  Full comp hsa-miR-302b-3p MIMAT0000715
ctactaaaacatggaagcactta

SEQ ID NO: 4103 - DNA, 22 bp, Artificial Sequence
  Synthetic oligonucleotide
  Full comp hsa-miR-92b-3p MIMAT0003218
ggaggccgggacgagtgcaata

SEQ ID NO: 4104 - DNA, 21 bp, Artificial Sequence
  Synthetic oligonucleotide
  Full comp hsa-miR-3140-5p MIMAT0019204
aaagcttttggtaattcaggt

SEQ ID NO: 4105 - DNA, 22 bp, Artificial Sequence
  Synthetic oligonucleotide
  Full comp hsa-miR-3680-5p MIMAT0018106
tgcacaatcctgtgagtgagtc

SEQ ID NO: 4106 - DNA, 23 bp, Artificial Sequence
  Synthetic oligonucleotide
  Full comp hsa-miR-8069 MIMAT0030996
acgccgaccgcccccaaccatcc

SEQ ID NO: 4107 - DNA, 22 bp, Artificial Sequence
  Synthetic oligonucleotide
  Full comp hsa-miR-6506-3p MIMAT0025469
gtgtctggaatctctgatacga

SEQ ID NO: 4108 - DNA, 20 bp, Artificial Sequence
  Synthetic oligonucleotide
  Full comp hsa-miR-3187-3p MIMAT0015069
ccgcgcagccccatggccaa

SEQ ID NO: 4109 - DNA, 22 bp, Artificial Sequence
  Synthetic oligonucleotide
  Full comp hsa-miR-758-5p MIMAT0022929
gtgtgctctctggtcaaccatc

SEQ ID NO: 4110 - DNA, 23 bp, Artificial Sequence
  Synthetic oligonucleotide
  Full comp hsa-miR-5089-3p MIMAT0022984
tcagtgggatttccgagtagcat

SEQ ID NO: 4111 - DNA, 23 bp, Artificial Sequence
  Synthetic oligonucleotide
  Full comp hsa-miR-3977 MIMAT0019362
taaggttaattacgatgaagcac

SEQ ID NO: 4112 - DNA, 22 bp, Artificial Sequence
  Synthetic oligonucleotide
  Full comp hsa-miR-5682 MIMAT0022470
accttatcctgcaaggtgctac

SEQ ID NO: 4113 - DNA, 22 bp, Artificial Sequence
  Synthetic oligonucleotide
  Full comp hsa-miR-377-5p MIMAT0004689
gaattcaccaagggcaacctct

SEQ ID NO: 4114 - DNA, 22 bp, Artificial Sequence
  Synthetic oligonucleotide
  Full comp hsa-miR-4695-3p MIMAT0019789
gaaggaggcagcggtgagatca

SEQ ID NO: 4115 - DNA, 20 bp, Artificial Sequence
  Synthetic oligonucleotide
  Full comp hsa-miR-562 MIMAT0003226
gcaaatggtacagctacttt

SEQ ID NO: 4116 - DNA, 17 bp, Artificial Sequence
  Synthetic oligonucleotide
  Full comp hsa-miR-4328 MIMAT0016926
aatcctgggaaaactgg

SEQ ID NO: 4117 - DNA, 20 bp, Artificial Sequence
  Synthetic oligonucleotide
  Full comp hsa-miR-202-3p MIMAT0002811
ttcccatgccctatacctct

SEQ ID NO: 4118 - DNA, 21 bp, Artificial Sequence
  Synthetic oligonucleotide
  Full comp hsa-miR-5196-3p MIMAT0021129
ctgggagggagacgaggatga

SEQ ID NO: 4119 - DNA, 18 bp, Artificial Sequence
  Synthetic oligonucleotide
  Full comp hsa-miR-4314 MIMAT0016868
ctgtcccatttcccagag

SEQ ID NO: 4120 - DNA, 22 bp, Artificial Sequence
  Synthetic oligonucleotide
  Full comp hsa-miR-3681-3p MIMAT0018109
agtagtggatgaagcactgtgt

SEQ ID NO: 4121 - DNA, 21 bp, Artificial Sequence
  Synthetic oligonucleotide
  Full comp hsa-miR-2114-3p MIMAT0011157
aagtcccttgcttgaggctcg

SEQ ID NO: 4122 - DNA, 22 bp, Artificial Sequence
  Synthetic oligonucleotide
  Full comp hsa-miR-5692a MIMAT0022484
acacccactgtggtattatttg

SEQ ID NO: 4123 - DNA, 22 bp, Artificial Sequence
  Synthetic oligonucleotide
  Full comp hsa-miR-615-5p MIMAT0004804
gatccgagcaccggggaccccc

SEQ ID NO: 4124 - DNA, 22 bp, Artificial Sequence
  Synthetic oligonucleotide
  Full comp hsa-miR-3677-3p MIMAT0018101
ggccgtggccagagcccacgag

SEQ ID NO: 4125 - DNA, 22 bp, Artificial Sequence
  Synthetic oligonucleotide
  Full comp hsa-miR-138-1-3p MIMAT0004607
ggccctggtgttgtgaagtagc

SEQ ID NO: 4126 - DNA, 24 bp, Artificial Sequence
  Synthetic oligonucleotide
  Full comp hsa-miR-4641 MIMAT0019701
tgaggcaaaagtatggcatgggca

SEQ ID NO: 4127 - DNA, 22 bp, Artificial Sequence
  Synthetic oligonucleotide
  Full comp hsa-miR-370-5p MIMAT0026483
gtaactgcagagacgtgacctg

SEQ ID NO: 4128 - DNA, 23 bp, Artificial Sequence
  Synthetic oligonucleotide
  Full comp hsa-miR-4732-5p MIMAT0019855
agcttcctgctccctgctctaca

SEQ ID NO: 4129 - DNA, 21 bp, Artificial Sequence
  Synthetic oligonucleotide
  Full comp hsa-miR-6760-3p MIMAT0027421
ctggggagaaggggacagtgt

SEQ ID NO: 4130 - DNA, 18 bp, Artificial Sequence
  Synthetic oligonucleotide
  Full comp hsa-miR-7162-5p MIMAT0028234
cagctgagaaaggaagca

SEQ ID NO: 4131 - DNA, 24 bp, Artificial Sequence
  Synthetic oligonucleotide
  Full comp hsa-miR-8060 MIMAT0030987
gtcctcctacccactgcttcatgg

SEQ ID NO: 4132 - DNA, 21 bp, Artificial Sequence
  Synthetic oligonucleotide
  Full comp hsa-miR-1237-5p MIMAT0022946
cgcgcttcggccccgcccccg

SEQ ID NO: 4133 - DNA, 22 bp, Artificial Sequence
  Synthetic oligonucleotide
  Full comp hsa-miR-4421 MIMAT0018934
tagctcctttccacagacaggt

SEQ ID NO: 4134 - DNA, 17 bp, Artificial Sequence
  Synthetic oligonucleotide
  Full comp hsa-miR-3195 MIMAT0015079
aacccgggcccggcgcg

SEQ ID NO: 4135 - DNA, 22 bp, Artificial Sequence
  Synthetic oligonucleotide
  Full comp hsa-miR-193a-5p MIMAT0004614
tcatctcgcccgcaaagaccca

SEQ ID NO: 4136 - DNA, 17 bp, Artificial Sequence
  Synthetic oligonucleotide
  Full comp hsa-miR-4486 MIMAT0019020
tgccagcctcgcccagc

SEQ ID NO: 4137 - DNA, 17 bp, Artificial Sequence
  Synthetic oligonucleotide
  Full comp hsa-miR-4534 MIMAT0019073
agacccctcctccatcc

SEQ ID NO: 4138 - DNA, 22 bp, Artificial Sequence
  Synthetic oligonucleotide
  Full comp hsa-miR-2278 MIMAT0011778
ccaggcaacacacactgctctc

SEQ ID NO: 4139 - DNA, 21 bp, Artificial Sequence
  Synthetic oligonucleotide
  Full comp hsa-miR-892c-5p MIMAT0025857
tgactggcacctttctgaata

SEQ ID NO: 4140 - DNA, 21 bp, Artificial Sequence
  Synthetic oligonucleotide
  Full comp hsa-miR-1179 MIMAT0005824
ccaaccaatgaaagaatgctt

SEQ ID NO: 4141 - DNA, 20 bp, Artificial Sequence
  Synthetic oligonucleotide
  Full comp hsa-miR-6834-3p MIMAT0027569
tgatggagggatgggacata

SEQ ID NO: 4142 - DNA, 22 bp, Artificial Sequence
  Synthetic oligonucleotide
  Full comp hsa-miR-380-5p MIMAT0000734
gcgcatgttctatggtcaacca

SEQ ID NO: 4143 - DNA, 22 bp, Artificial Sequence
  Synthetic oligonucleotide
  Full comp hsa-miR-6759-3p MIMAT0027419
ctgaggggagaggcaaaggtca

SEQ ID NO: 4144 - DNA, 23 bp, Artificial Sequence
  Synthetic oligonucleotide
  Full comp hsa-miR-19b-1-5p MIMAT0004491
gctggatgcaaacctgcaaaact

SEQ ID NO: 4145 - DNA, 23 bp, Artificial Sequence
  Synthetic oligonucleotide
  Full comp hsa-miR-500a-5p MIMAT0004773
tctcacccaggtagcaaggatta

SEQ ID NO: 4146 - DNA, 22 bp, Artificial Sequence
  Synthetic oligonucleotide
  Full comp hsa-miR-744-5p MIMAT0004945
tgctgttagccctagccccgca

SEQ ID NO: 4147 - DNA, 22 bp, Artificial Sequence
  Synthetic oligonucleotide
  Full comp hsa-miR-26a-2-3p MIMAT0004681
gaaacaagtaatcaagaatagg

SEQ ID NO: 4148 - DNA, 23 bp, Artificial Sequence
  Synthetic oligonucleotide
  Full comp hsa-miR-3605-3p MIMAT0017982
ctagaggacaggtaacacggagg

SEQ ID NO: 4149 - DNA, 22 bp, Artificial Sequence
  Synthetic oligonucleotide
  Full comp hsa-miR-34a-3p MIMAT0004557
agggcagtatacttgctgattg

SEQ ID NO: 4150 - DNA, 22 bp, Artificial Sequence
  Synthetic oligonucleotide
  Full comp hsa-miR-4677-3p MIMAT0019761
agtagttctttggtctcacaga

SEQ ID NO: 4151 - DNA, 20 bp, Artificial Sequence
  Synthetic oligonucleotide
  Full comp hsa-miR-3653-5p MIMAT0032110
gaagaagaatcatcaggagg

SEQ ID NO: 4152 - DNA, 22 bp, Artificial Sequence
  Synthetic oligonucleotide
  Full comp hsa-miR-758-3p MIMAT0003879
ggttagtggaccaggtcacaaa

SEQ ID NO: 4153 - DNA, 22 bp, Artificial Sequence
  Synthetic oligonucleotide
  Full comp hsa-miR-3122 MIMAT0014984
aagaccgtcctcttgtcccaac

SEQ ID NO: 4154 - DNA, 20 bp, Artificial Sequence
  Synthetic oligonucleotide
  Full comp hsa-miR-6732-5p MIMAT0027365
ggccagcctgccacccccta

SEQ ID NO: 4155 - DNA, 18 bp, Artificial Sequence
  Synthetic oligonucleotide
  Full comp hsa-miR-4274 MIMAT0016906
cagggggagggactgctg

SEQ ID NO: 4156 - DNA, 23 bp, Artificial Sequence
  Synthetic oligonucleotide
  Full comp hsa-miR-598-5p MIMAT0026620
gctcacaccatcgggatcaccgc

SEQ ID NO: 4157 - DNA, 22 bp, Artificial Sequence
  Synthetic oligonucleotide
  Full comp hsa-miR-4465 MIMAT0018992
tcccctggtcagactacttgag

SEQ ID NO: 4158 - DNA, 21 bp, Artificial Sequence
  Synthetic oligonucleotide
  Full comp hsa-miR-548ar-3p MIMAT0022266
gcaaaaataactgcagtttta

SEQ ID NO: 4159 - DNA, 21 bp, Artificial Sequence
  Synthetic oligonucleotide
  Full comp hsa-miR-4690-3p MIMAT0019780
cagaggcctcagctgggctgc

SEQ ID NO: 4160 - DNA, 22 bp, Artificial Sequence
  Synthetic oligonucleotide
  Full comp hsa-miR-202-5p MIMAT0002810
caaagaagtatatgcataggaa

SEQ ID NO: 4161 - DNA, 20 bp, Artificial Sequence
  Synthetic oligonucleotide
  Full comp hsa-miR-378d MIMAT0018926
tttctgactccaagtccagt

SEQ ID NO: 4162 - DNA, 25 bp, Artificial Sequence
  Synthetic oligonucleotide
  Full comp hsa-miR-6765-5p MIMAT0027430
acacaccctcctggccccgcctcac

SEQ ID NO: 4163 - DNA, 23 bp, Artificial Sequence
  Synthetic oligonucleotide
  Full comp hsa-miR-6511a-5p MIMAT0025478
cctgtcagccccacttctgcctg

SEQ ID NO: 4164 - DNA, 21 bp, Artificial Sequence
  Synthetic oligonucleotide
  Full comp hsa-miR-1267 MIMAT0005921
tggggattacacttcaacagg

SEQ ID NO: 4165 - DNA, 23 bp, Artificial Sequence
  Synthetic oligonucleotide
  Full comp hsa-miR-4668-5p MIMAT0019745
gacaaatccttttttttttccct

SEQ ID NO: 4166 - DNA, 22 bp, Artificial Sequence
  Synthetic oligonucleotide
  Full comp hsa-miR-6730-3p MIMAT0027362
tgagggcagatggggtgtcagg

SEQ ID NO: 4167 - DNA, 22 bp, Artificial Sequence
  Synthetic oligonucleotide
  Full comp hsa-miR-4671-5p MIMAT0019752
agattagcgcacagtcttcggt

SEQ ID NO: 4168 - DNA, 20 bp, Artificial Sequence
  Synthetic oligonucleotide
  Full comp hsa-miR-920 MIMAT0004970
tactgcttccacagctcccc

SEQ ID NO: 4169 - DNA, 23 bp, Artificial Sequence
  Synthetic oligonucleotide
  Full comp hsa-miR-6826-5p MIMAT0027552
aggtcccacctctttcctattga

SEQ ID NO: 4170 - DNA, 22 bp, Artificial Sequence
  Synthetic oligonucleotide
  Full comp hsa-miR-5092 MIMAT0021084
gatgccaagctcagcgtggatt

SEQ ID NO: 4171 - DNA, 22 bp, Artificial Sequence
  Synthetic oligonucleotide
  Full comp hsa-miR-135a-3p MIMAT0004595
cgccacggctccaatccctata

SEQ ID NO: 4172 - DNA, 18 bp, Artificial Sequence
  Synthetic oligonucleotide
  Full comp hsa-miR-516a-3p MIMAT0006778
accctctgaaaggaagca

SEQ ID NO: 4173 - DNA, 22 bp, Artificial Sequence
  Synthetic oligonucleotide
  Full comp hsa-miR-548b-5p MIMAT0004798
ggccaaaaccacaattactttt

SEQ ID NO: 4174 - DNA, 22 bp, Artificial Sequence
  Synthetic oligonucleotide
  Full comp hsa-miR-4513 MIMAT0019050
atgggcctccagccgtcagtct

SEQ ID NO: 4175 - DNA, 22 bp, Artificial Sequence
  Synthetic oligonucleotide
  Full comp hsa-miR-518e-5p MIMAT0005450
cagaaagcgcttccctctagag

SEQ ID NO: 4176 - DNA, 22 bp, Artificial Sequence
  Synthetic oligonucleotide
  Full comp hsa-miR-205-5p MIMAT0000266
cagactccggtggaatgaagga

SEQ ID NO: 4177 - DNA, 19 bp, Artificial Sequence
  Synthetic oligonucleotide
  Full comp hsa-miR-593-3p MIMAT0004802
agaaaccccagcagagaca

SEQ ID NO: 4178 - DNA, 22 bp, Artificial Sequence
  Synthetic oligonucleotide
  Full comp hsa-miR-6836-5p MIMAT0027574
atgcctgcgccagggccctgcg

SEQ ID NO: 4179 - DNA, 21 bp, Artificial Sequence
  Synthetic oligonucleotide
  Full comp hsa-miR-6515-5p MIMAT0025486
gatgtcttccacaccctccaa

SEQ ID NO: 4180 - DNA, 21 bp, Artificial Sequence
  Synthetic oligonucleotide
  Full comp hsa-miR-653-5p MIMAT0003328
cagtagagattgtttcaacac

SEQ ID NO: 4181 - DNA, 23 bp, Artificial Sequence
  Synthetic oligonucleotide
  Full comp hsa-miR-6503-5p MIMAT0025462
tctggggatttgaatgcagacct

SEQ ID NO: 4182 - DNA, 21 bp, Artificial Sequence
  Synthetic oligonucleotide
  Full comp hsa-miR-6504-5p MIMAT0025464
ctgcattacagcacagccaga

SEQ ID NO: 4183 - DNA, 22 bp, Artificial Sequence
  Synthetic oligonucleotide
  Full comp hsa-miR-627-5p MIMAT0003296
tcctcttttcttagagactcac

SEQ ID NO: 4184 - DNA, 22 bp, Artificial Sequence
  Synthetic oligonucleotide
  Full comp hsa-miR-3618 MIMAT0017998
gctcttttcattaatgtagaca

SEQ ID NO: 4185 - DNA, 21 bp, Artificial Sequence
  Synthetic oligonucleotide
  Full comp hsa-miR-5186 MIMAT0021116
acctgatttctaccaatctct

SEQ ID NO: 4186 - DNA, 23 bp, Artificial Sequence
  Synthetic oligonucleotide
  Full comp hsa-miR-513a-3p MIMAT0004777
ccttctcagaaaggtgaaattta

SEQ ID NO: 4187 - DNA, 22 bp, Artificial Sequence
  Synthetic oligonucleotide
  Full comp hsa-miR-210-5p MIMAT0026475
cagtgtgcggtgggcaggggct

SEQ ID NO: 4188 - DNA, 22 bp, Artificial Sequence
  Synthetic oligonucleotide
  Full comp hsa-miR-5196-5p MIMAT0021128
cccaaccctcgtccccttccct

SEQ ID NO: 4189 - DNA, 19 bp, Artificial Sequence
  Synthetic oligonucleotide
  Full comp hsa-miR-6078 MIMAT0023703
ccacagctagctcaggcgg

SEQ ID NO: 4190 - DNA, 22 bp, Artificial Sequence
  Synthetic oligonucleotide
  Full comp hsa-miR-4708-3p MIMAT0019810
atcagagagatgccgccttgct

SEQ ID NO: 4191 - DNA, 22 bp, Artificial Sequence
  Synthetic oligonucleotide
  Full comp hsa-miR-3173-5p MIMAT0019214
aaaggagaaaacaggcagggca

SEQ ID NO: 4192 - DNA, 21 bp, Artificial Sequence
  Synthetic oligonucleotide
  Full comp hsa-miR-4748 MIMAT0019884
agcaaatcctccccaaacctc

SEQ ID NO: 4193 - DNA, 18 bp, Artificial Sequence
  Synthetic oligonucleotide
  Full comp hsa-miR-4302 MIMAT0016855
ctcgctgagccacactgg

SEQ ID NO: 4194 - DNA, 21 bp, Artificial Sequence
  Synthetic oligonucleotide
  Full comp hsa-miR-4735-3p MIMAT0019861
atgtctaatttgagcaccttt

SEQ ID NO: 4195 - DNA, 22 bp, Artificial Sequence
  Synthetic oligonucleotide
  Full comp hsa-miR-223-3p MIMAT0000280
tggggtatttgacaaactgaca

SEQ ID NO: 4196 - DNA, 21 bp, Artificial Sequence
  Synthetic oligonucleotide
  Full comp hsa-miR-142-5p MIMAT0000433
agtagtgctttctactttatg

SEQ ID NO: 4197 - DNA, 22 bp, Artificial Sequence
  Synthetic oligonucleotide
  Full comp hsa-miR-6803-3p MIMAT0027507
ctgagggtgagaaggcgaggga

SEQ ID NO: 4198 - DNA, 22 bp, Artificial Sequence
  Synthetic oligonucleotide
  Full comp hsa-miR-6511a-3p MIMAT0025479
gcaggcagaagggatggtgagg

SEQ ID NO: 4199 - DNA, 21 bp, Artificial Sequence
  Synthetic oligonucleotide
  Full comp hsa-miR-507 MIMAT0002879
ttcactccaaaaggtgcaaaa

SEQ ID NO: 4200 - DNA, 22 bp, Artificial Sequence
  Synthetic oligonucleotide
  Full comp hsa-miR-5583-5p MIMAT0022281
cagaatatgggtatattagttt

SEQ ID NO: 4201 - DNA, 24 bp, Artificial Sequence
  Synthetic oligonucleotide
  Full comp hsa-miR-3171 MIMAT0015046
gatatatacagattccatacatct

SEQ ID NO: 4202 - DNA, 22 bp, Artificial Sequence
  Synthetic oligonucleotide
  Full comp hsa-miR-3908 MIMAT0018182
aaacagtctacctacattgctc

SEQ ID NO: 4203 - DNA, 21 bp, Artificial Sequence
  Synthetic oligonucleotide
  Full comp hsa-miR-4761-5p MIMAT0019908
ggtcaggcatgcacaccttgt

SEQ ID NO: 4204 - DNA, 24 bp, Artificial Sequence
  Synthetic oligonucleotide
  Full comp hsa-miR-8053 MIMAT0030980
tgccattgagttccaaaatcgcca

SEQ ID NO: 4205 - DNA, 22 bp, Artificial Sequence
  Synthetic oligonucleotide
  Full comp hsa-miR-186-3p MIMAT0004612
cccaaaaaattcacctttgggc

SEQ ID NO: 4206 - DNA, 22 bp, Artificial Sequence
  Synthetic oligonucleotide
  Full comp hsa-miR-3689d MIMAT0019008
cgagtgtgagatcacacctccc

SEQ ID NO: 4207 - DNA, 21 bp, Artificial Sequence
  Synthetic oligonucleotide
  Full comp hsa-miR-6769b-3p MIMAT0027621
ctatgggtgggacagagaggg

SEQ ID NO: 4208 - DNA, 23 bp, Artificial Sequence
  Synthetic oligonucleotide
  Full comp hsa-miR-7106-3p MIMAT0028110
ctgggacagggattcagggagct

SEQ ID NO: 4209 - DNA, 22 bp, Artificial Sequence
  Synthetic oligonucleotide
  Full comp hsa-miR-10a-3p MIMAT0004555
tattcccctagatacgaatttg

SEQ ID NO: 4210 - DNA, 21 bp, Artificial Sequence
  Synthetic oligonucleotide
  Full comp hsa-miR-6815-3p MIMAT0027531
ctgggtgtgcaagagaagcca

SEQ ID NO: 4211 - DNA, 20 bp, Artificial Sequence
  Synthetic oligonucleotide
  Full comp hsa-miR-6088 MIMAT0023713
cgcccccccgcttcatctct

SEQ ID NO: 4212 - DNA, 22 bp, Artificial Sequence
  Synthetic oligonucleotide
  Full comp hsa-miR-1-3p MIMAT0000416
atacatacttctttacattcca

SEQ ID NO: 4213 - DNA, 22 bp, Artificial Sequence
  Synthetic oligonucleotide
  Full comp hsa-miR-200a-5p MIMAT0001620
tccagcactgtccggtaagatg

SEQ ID NO: 4214 - DNA, 22 bp, Artificial Sequence
  Synthetic oligonucleotide
  Full comp hsa-miR-3202 MIMAT0015089
attaaagctcttctcccttcca

SEQ ID NO: 4215 - DNA, 22 bp, Artificial Sequence
  Synthetic oligonucleotide
  Full comp hsa-miR-6833-5p MIMAT0027566
tttctcctcccatcttccacac

SEQ ID NO: 4216 - DNA, 21 bp, Artificial Sequence
  Synthetic oligonucleotide
  Full comp hsa-miR-943 MIMAT0004986
ctggaggacggcaacagtcag

SEQ ID NO: 4217 - DNA, 22 bp, Artificial Sequence
  Synthetic oligonucleotide
  Full comp hsa-miR-6883-5p MIMAT0027666
acatccataccacaccctccct

SEQ ID NO: 4218 - DNA, 20 bp, Artificial Sequence
  Synthetic oligonucleotide
  Full comp hsa-miR-6890-3p MIMAT0027681
ctgtggggcataggcagtgg

SEQ ID NO: 4219 - DNA, 22 bp, Artificial Sequence
  Synthetic oligonucleotide
  Full comp hsa-let-7b-3p MIMAT0004482
gggaaggcagtaggttgtatag

SEQ ID NO: 4220 - DNA, 23 bp, Artificial Sequence
  Synthetic oligonucleotide
  Full comp hsa-miR-3149 MIMAT0015022
atacacacacatatccatacaaa

SEQ ID NO: 4221 - DNA, 23 bp, Artificial Sequence
  Synthetic oligonucleotide
  Full comp hsa-miR-6878-5p MIMAT0027656
cttcagcttctagctttctccct

SEQ ID NO: 4222 - DNA, 22 bp, Artificial Sequence
  Synthetic oligonucleotide
  Full comp hsa-miR-146b-3p MIMAT0004766
ccagaactgagtccacagggca

SEQ ID NO: 4223 - DNA, 22 bp, Artificial Sequence
  Synthetic oligonucleotide
  Full comp hsa-miR-4731-5p MIMAT0019853
cacactcatgtggcccccagca

SEQ ID NO: 4224 - DNA, 21 bp, Artificial Sequence
  Synthetic oligonucleotide
  Full comp hsa-let-7g-3p MIMAT0004584
gcaaggcagtggcctgtacag

SEQ ID NO: 4225 - DNA, 21 bp, Artificial Sequence
  Synthetic oligonucleotide
  Full comp hsa-miR-5590-5p MIMAT0022299
aataaagtctatgtatggcaa

SEQ ID NO: 4226 - DNA, 22 bp, Artificial Sequence
  Synthetic oligonucleotide
  Full comp hsa-miR-551b-5p MIMAT0004794
ggtctcacccacgcttgatttc

SEQ ID NO: 4227 - DNA, 23 bp, Artificial Sequence
  Synthetic oligonucleotide
  Full comp hsa-miR-302a-5p MIMAT0000683
agcaagtacatccacgtttaagt

SEQ ID NO: 4228 - DNA, 22 bp, Artificial Sequence
  Synthetic oligonucleotide
  Full comp hsa-miR-769-5p MIMAT0003886
agctcagaacccagaggtctca

SEQ ID NO: 4229 - DNA, 21 bp, Artificial Sequence
  Synthetic oligonucleotide
  Full comp hsa-miR-3186-3p MIMAT0015068
caaagccatctctccgcgtga

SEQ ID NO: 4230 - DNA, 23 bp, Artificial Sequence
  Synthetic oligonucleotide
  Full comp hsa-miR-19a-3p MIMAT0000073
tcagttttgcatagatttgcaca

SEQ ID NO: 4231 - DNA, 22 bp, Artificial Sequence
  Synthetic oligonucleotide
  Full comp hsa-miR-381-5p MIMAT0022862
atatacaaagggcaacctcgct

SEQ ID NO: 4232 - DNA, 22 bp, Artificial Sequence
  Synthetic oligonucleotide
  Full comp hsa-miR-6741-3p MIMAT0027384
ctagggtgagggagagagccga

SEQ ID NO: 4233 - DNA, 19 bp, Artificial Sequence
  Synthetic oligonucleotide
  Full comp hsa-miR-7155-5p MIMAT0028220
gatggcccaagaccccaga

SEQ ID NO: 4234 - DNA, 19 bp, Artificial Sequence
  Synthetic oligonucleotide
  Full comp hsa-miR-6845-5p MIMAT0027590
gctctctgctctggccccg

SEQ ID NO: 4235 - DNA, 22 bp, Artificial Sequence
  Synthetic oligonucleotide
  Full comp hsa-miR-544b MIMAT0015004
ttagaaatgcacaacctcaggt

SEQ ID NO: 4236 - DNA, 18 bp, Artificial Sequence
  Synthetic oligonucleotide
  Full comp hsa-miR-4505 MIMAT0019041
tccgtcccagcccagcct

SEQ ID NO: 4237 - DNA, 22 bp, Artificial Sequence
  Synthetic oligonucleotide
  Full comp hsa-miR-8073 MIMAT0031000
acgacgctccctgctgccaggt

SEQ ID NO: 4238 - DNA, 22 bp, Artificial Sequence
  Synthetic oligonucleotide
  Full comp hsa-miR-4633-3p MIMAT0019690
tgcatatgcctggctagctcct

SEQ ID NO: 4239 - DNA, 22 bp, Artificial Sequence
  Synthetic oligonucleotide
  Full comp hsa-miR-4694-5p MIMAT0019786
gcaaatggataggataacacct

SEQ ID NO: 4240 - DNA, 22 bp, Artificial Sequence
  Synthetic oligonucleotide
  Full comp hsa-miR-3677-5p MIMAT0019221
cactgcagggctctggccactg

SEQ ID NO: 4241 - DNA, 23 bp, Artificial Sequence
  Synthetic oligonucleotide
  Full comp hsa-miR-7848-3p MIMAT0030423
tgtggtaagcagaccgagggtag

SEQ ID NO: 4242 - DNA, 22 bp, Artificial Sequence
  Synthetic oligonucleotide
  Full comp hsa-miR-4491 MIMAT0019026
tttggtcacaccagtccacatt

SEQ ID NO: 4243 - DNA, 23 bp, Artificial Sequence
  Synthetic oligonucleotide
  Full comp hsa-miR-668-3p MIMAT0003881
gtagtgggccgagccgagtgaca

SEQ ID NO: 4244 - DNA, 22 bp, Artificial Sequence
  Synthetic oligonucleotide
  Full comp hsa-miR-938 MIMAT0004981
actgggttcacctttaagggca

SEQ ID NO: 4245 - DNA, 22 bp, Artificial Sequence
  Synthetic oligonucleotide
  Full comp hsa-miR-3074-3p MIMAT0015027
cggtgcctactgagctgatatc

SEQ ID NO: 4246 - DNA, 22 bp, Artificial Sequence
  Synthetic oligonucleotide
  Full comp hsa-miR-6716-3p MIMAT0025845
gcagaggaatggagagttcgga

SEQ ID NO: 4247 - DNA, 23 bp, Artificial Sequence
  Synthetic oligonucleotide
  Full comp hsa-miR-342-3p MIMAT0000753
acgggtgcgatttctgtgtgaga

SEQ ID NO: 4248 - DNA, 22 bp, Artificial Sequence
  Synthetic oligonucleotide
  Full comp hsa-miR-584-5p MIMAT0003249
ctcagtcccaggcaaaccataa

SEQ ID NO: 4249 - DNA, 18 bp, Artificial Sequence
  Synthetic oligonucleotide
  Full comp hsa-miR-5587-5p MIMAT0022289
agtcccggaggtgaccat

SEQ ID NO: 4250 - DNA, 24 bp, Artificial Sequence
  Synthetic oligonucleotide
  Full comp hsa-miR-298 MIMAT0004901
tgggagaacctccctgcttctgct

SEQ ID NO: 4251 - DNA, 23 bp, Artificial Sequence
  Synthetic oligonucleotide
  Full comp hsa-miR-8055 MIMAT0030982
tccgtctgctcatgtgctcaaag

SEQ ID NO: 4252 - DNA, 22 bp, Artificial Sequence
  Synthetic oligonucleotide
  Full comp hsa-miR-3612 MIMAT0017989
tccatttctcaagatgcctcct

SEQ ID NO: 4253 - DNA, 23 bp, Artificial Sequence
  Synthetic oligonucleotide
  Full comp hsa-miR-542-5p MIMAT0003340
tctcgtgacatgatgatccccga

SEQ ID NO: 4254 - DNA, 23 bp, Artificial Sequence
  Synthetic oligonucleotide
  Full comp hsa-miR-19b-3p MIMAT0000074
tcagttttgcatggatttgcaca

SEQ ID NO: 4255 - DNA, 20 bp, Artificial Sequence
  Synthetic oligonucleotide
  Full comp hsa-miR-1231 MIMAT0005586
gcagctgtccgcccagacac

SEQ ID NO: 4256 - DNA, 17 bp, Artificial Sequence
  Synthetic oligonucleotide
  Full comp hsa-miR-4255 MIMAT0016885
tccatctctgaacactg

SEQ ID NO: 4257 - DNA, 23 bp, Artificial Sequence
  Synthetic oligonucleotide
  Full comp hsa-miR-675-5p MIMAT0004284
cactgtgggccctctccgcacca

SEQ ID NO: 4258 - DNA, 23 bp, Artificial Sequence
  Synthetic oligonucleotide
  Full comp hsa-miR-199a-5p MIMAT0000231
gaacaggtagtctgaacactggg

SEQ ID NO: 4259 - DNA, 22 bp, Artificial Sequence
  Synthetic oligonucleotide
  Full comp hsa-miR-513b-5p MIMAT0005788
ataaatgacacctccttgtgaa

SEQ ID NO: 4260 - DNA, 17 bp, Artificial Sequence
  Synthetic oligonucleotide
  Full comp hsa-miR-4455 MIMAT0018977
aaaaacacacacaccct

SEQ ID NO: 4261 - DNA, 21 bp, Artificial Sequence
  Synthetic oligonucleotide
  Full comp hsa-miR-3682-3p MIMAT0018110
ctacctccacctgtatcatca

SEQ ID NO: 4262 - DNA, 19 bp, Artificial Sequence
  Synthetic oligonucleotide
  Full comp hsa-miR-9500 MIMAT0035542
gtggtcaccatcttccctt

SEQ ID NO: 4263 - DNA, 22 bp, Artificial Sequence
  Synthetic oligonucleotide
  Full comp hsa-miR-6828-5p MIMAT0027556
ccacagggttctcttgcttcct

SEQ ID NO: 4264 - DNA, 21 bp, Artificial Sequence
  Synthetic oligonucleotide
  Full comp hsa-miR-6718-5p MIMAT0025849
tcataagccctctgaccacta

SEQ ID NO: 4265 - DNA, 21 bp, Artificial Sequence
  Synthetic oligonucleotide
  Full comp hsa-miR-939-3p MIMAT0022939
ctggggagcagaggcccaggg

SEQ ID NO: 4266 - DNA, 20 bp, Artificial Sequence
  Synthetic oligonucleotide
  Full comp hsa-miR-548ad-5p MIMAT0032114
caaaaaccacaattactttt

SEQ ID NO: 4267 - DNA, 23 bp, Artificial Sequence
  Synthetic oligonucleotide
  Full comp hsa-miR-339-3p MIMAT0004702
cggctctgtcgtcgaggcgctca

SEQ ID NO: 4268 - DNA, 22 bp, Artificial Sequence
  Synthetic oligonucleotide
  Full comp hsa-miR-630 MIMAT0003299
accttccctggtacagaatact

SEQ ID NO: 4269 - DNA, 25 bp, Artificial Sequence
  Synthetic oligonucleotide
  Full comp hsa-miR-4739 MIMAT0019868
agggcccctccgctcctcctccctt

SEQ ID NO: 4270 - DNA, 19 bp, Artificial Sequence
  Synthetic oligonucleotide
  Full comp hsa-miR-1246 MIMAT0005898
cctgctccaaaaatccatt

SEQ ID NO: 4271 - DNA, 23 bp, Artificial Sequence
  Synthetic oligonucleotide
  Full comp hsa-miR-600 MIMAT0003268
gagcaaggctcttgtctgtaagt

SEQ ID NO: 4272 - DNA, 22 bp, Artificial Sequence
  Synthetic oligonucleotide
  Full comp hsa-miR-3135b MIMAT0018985
caccactgcactcgctccagcc

SEQ ID NO: 4273 - DNA, 22 bp, Artificial Sequence
  Synthetic oligonucleotide
  Full comp hsa-miR-129-1-3p MIMAT0004548
atactttttggggtaagggctt

SEQ ID NO: 4274 - DNA, 21 bp, Artificial Sequence
  Synthetic oligonucleotide
  Full comp hsa-miR-4268 MIMAT0016896
cacatcctgagaggaggagcc

SEQ ID NO: 4275 - DNA, 22 bp, Artificial Sequence
  Synthetic oligonucleotide
  Full comp hsa-miR-876-5p MIMAT0004924
tggtgattcacaaagaaatcca

SEQ ID NO: 4276 - DNA, 22 bp, Artificial Sequence
  Synthetic oligonucleotide
  Full comp hsa-miR-3145-5p MIMAT0019205
tgagttttgagtgtttggagtt

SEQ ID NO: 4277 - DNA, 23 bp, Artificial Sequence
  Synthetic oligonucleotide
  Full comp hsa-miR-582-5p MIMAT0003247
agtaactggttgaacaactgtaa

SEQ ID NO: 4278 - DNA, 21 bp, Artificial Sequence
  Synthetic oligonucleotide
  Full comp hsa-miR-1470 MIMAT0007348
cggggtgcacgggcggagggc

SEQ ID NO: 4279 - DNA, 18 bp, Artificial Sequence
  Synthetic oligonucleotide
  Full comp hsa-miR-4419b MIMAT0019034
ccatcttccttcagcctc

SEQ ID NO: 4280 - DNA, 16 bp, Artificial Sequence
  Synthetic oligonucleotide
  Full comp hsa-miR-4291 MIMAT0016922
agctgttcctgctgaa

SEQ ID NO: 4281 - DNA, 22 bp, Artificial Sequence
  Synthetic oligonucleotide
  Full comp hsa-miR-766-5p MIMAT0022714
aagaccagcaccaattcctcct

SEQ ID NO: 4282 - DNA, 20 bp, Artificial Sequence
  Synthetic oligonucleotide
  Full comp hsa-miR-548ae-5p MIMAT0032115
caaaaaccacaattactttt

SEQ ID NO: 4283 - DNA, 22 bp, Artificial Sequence
  Synthetic oligonucleotide
  Full comp hsa-miR-1271-3p MIMAT0022712
tgcctggcacatagcaggcact

SEQ ID NO: 4284 - DNA, 23 bp, Artificial Sequence
  Synthetic oligonucleotide
  Full comp hsa-miR-200c-3p MIMAT0000617
tccatcattacccggcagtatta

SEQ ID NO: 4285 - DNA, 21 bp, Artificial Sequence
  Synthetic oligonucleotide
  Full comp hsa-miR-549a MIMAT0003333
agagctcatccatagttgtca

SEQ ID NO: 4286 - DNA, 22 bp, Artificial Sequence
  Synthetic oligonucleotide
  Full comp hsa-miR-4721 MIMAT0019835
ccaccgtcacctggagccctca

SEQ ID NO: 4287 - DNA, 23 bp, Artificial Sequence
  Synthetic oligonucleotide
  Full comp hsa-miR-6810-5p MIMAT0027520
gccatgctgatccctgtccccat

SEQ ID NO: 4288 - DNA, 24 bp, Artificial Sequence
  Synthetic oligonucleotide
  Full comp hsa-miR-6853-5p MIMAT0027606
ctgacttcatggacatcccacgct

SEQ ID NO: 4289 - DNA, 23 bp, Artificial Sequence
  Synthetic oligonucleotide
  Full comp hsa-miR-4744 MIMAT0019875
catagcgaagtctagtctttaga

SEQ ID NO: 4290 - DNA, 24 bp, Artificial Sequence
  Synthetic oligonucleotide
  Full comp hsa-miR-3670 MIMAT0018093
tagagaaggacagctgtgagctct

SEQ ID NO: 4291 - DNA, 21 bp, Artificial Sequence
  Synthetic oligonucleotide
  Full comp hsa-miR-3925-3p MIMAT0019228
caagagaactaaaactggagt

SEQ ID NO: 4292 - DNA, 22 bp, Artificial Sequence
  Synthetic oligonucleotide
  Full comp hsa-miR-17-3p MIMAT0000071
ctacaagtgccttcactgcagt

SEQ ID NO: 4293 - DNA, 22 bp, Artificial Sequence
  Synthetic oligonucleotide
  Full comp hsa-miR-4652-3p MIMAT0019717
tgaggggatgggttaacagaac

SEQ ID NO: 4294 - DNA, 22 bp, Artificial Sequence
  Synthetic oligonucleotide
  Full comp hsa-miR-5585-5p MIMAT0022285
ctctcgagtagctggtacttca

SEQ ID NO: 4295 - DNA, 22 bp, Artificial Sequence
  Synthetic oligonucleotide
  Full comp hsa-miR-196b-3p MIMAT0009201
gaaggcagtgtcgtgctgtcga

SEQ ID NO: 4296 - DNA, 22 bp, Artificial Sequence
  Synthetic oligonucleotide
  Full comp hsa-miR-196a-3p MIMAT0004562
ctcaggcagtttcttgttgccg

SEQ ID NO: 4297 - DNA, 22 bp, Artificial Sequence
  Synthetic oligonucleotide
  Full comp hsa-miR-3200-3p MIMAT0015085
cagacctgagtagcgcaaggtg

SEQ ID NO: 4298 - DNA, 18 bp, Artificial Sequence
  Synthetic oligonucleotide
  Full comp hsa-miR-320e MIMAT0015072
ccttctcaacccagcttt

SEQ ID NO: 4299 - DNA, 21 bp, Artificial Sequence
  Synthetic oligonucleotide
  Full comp hsa-miR-4433a-5p MIMAT0020956
acaggagtggggggtgggacg

SEQ ID NO: 4300 - DNA, 21 bp, Artificial Sequence
  Synthetic oligonucleotide
  Full comp hsa-miR-4804-3p MIMAT0019985
tttcgagggcaaggttaagca

SEQ ID NO: 4301 - DNA, 22 bp, Artificial Sequence
  Synthetic oligonucleotide
  Full comp hsa-miR-548ba MIMAT0031175
agcaaaaatcacagttaccttt

SEQ ID NO: 4302 - DNA, 22 bp, Artificial Sequence
  Synthetic oligonucleotide
  Full comp hsa-miR-3689a-3p MIMAT0018118
accacgatatcacacctcccag

SEQ ID NO: 4303 - DNA, 22 bp, Artificial Sequence
  Synthetic oligonucleotide
  Full comp hsa-miR-548d-3p MIMAT0003323
gcaaaagaaactgtggtttttg

SEQ ID NO: 4304 - DNA, 23 bp, Artificial Sequence
  Synthetic oligonucleotide
  Full comp hsa-miR-8080 MIMAT0031007
agccgttgacaccagtgtccttc

SEQ ID NO: 4305 - DNA, 22 bp, Artificial Sequence
  Synthetic oligonucleotide
  Full comp hsa-miR-1912 MIMAT0007887
ttcacactgcatgctctgggta

SEQ ID NO: 4306 - DNA, 17 bp, Artificial Sequence
  Synthetic oligonucleotide
  Full comp hsa-miR-4316 MIMAT0016867
caccagctagcctcacc

SEQ ID NO: 4307 - DNA, 22 bp, Artificial Sequence
  Synthetic oligonucleotide
  Full comp hsa-miR-548az-5p MIMAT0025456
gcaaaaaccacaatcacttttg

SEQ ID NO: 4308 - DNA, 22 bp, Artificial Sequence
  Synthetic oligonucleotide
  Full comp hsa-miR-4690-5p MIMAT0019779
ttcagcccagcctcgcctgctc

SEQ ID NO: 4309 - DNA, 22 bp, Artificial Sequence
  Synthetic oligonucleotide
  Full comp hsa-miR-4717-5p MIMAT0019829
acacatgggtggctgtggccta

SEQ ID NO: 4310 - DNA, 22 bp, Artificial Sequence
  Synthetic oligonucleotide
  Full comp hsa-miR-3678-3p MIMAT0018103
ccggtccgtacaaactctgcag

SEQ ID NO: 4311 - DNA, 21 bp, Artificial Sequence
  Synthetic oligonucleotide
  Full comp hsa-miR-3194-5p MIMAT0015078
cagccctcctggtggctggcc

SEQ ID NO: 4312 - DNA, 22 bp, Artificial Sequence
  Synthetic oligonucleotide
  Full comp hsa-miR-605-3p MIMAT0026621
tctaaatctcatagtgccttct

SEQ ID NO: 4313 - DNA, 22 bp, Artificial Sequence
  Synthetic oligonucleotide
  Full comp hsa-miR-3591-3p MIMAT0019877
gtggagtgtgacaatggtgttt

SEQ ID NO: 4314 - DNA, 25 bp, Artificial Sequence
  Synthetic oligonucleotide
  Full comp hsa-miR-4706 MIMAT0019806
aagcagcgcccacttcctccccgct

SEQ ID NO: 4315 - DNA, 22 bp, Artificial Sequence
  Synthetic oligonucleotide
  Full comp hsa-miR-4725-3p MIMAT0019844
cccgacactgacgccttcccca

SEQ ID NO: 4316 - DNA, 20 bp, Artificial Sequence
  Synthetic oligonucleotide
  Full comp hsa-miR-4432 MIMAT0018948
aggcatcttgcagagtcttt

SEQ ID NO: 4317 - DNA, 22 bp, Artificial Sequence
  Synthetic oligonucleotide
  Full comp hsa-miR-7849-3p MIMAT0030424
aggcccaagatcaacaattgtc

SEQ ID NO: 4318 - DNA, 23 bp, Artificial Sequence
  Synthetic oligonucleotide
  Full comp hsa-miR-503-3p MIMAT0022925
cctggcagcggaaacaatacccc

SEQ ID NO: 4319 - DNA, 21 bp, Artificial Sequence
  Synthetic oligonucleotide
  Full comp hsa-miR-6731-3p MIMAT0027364
ctggggagagtggggaataga

SEQ ID NO: 4320 - DNA, 22 bp, Artificial Sequence
  Synthetic oligonucleotide
  Full comp hsa-miR-1307-3p MIMAT0005951
cacgaccgacgccacgccgagt

SEQ ID NO: 4321 - DNA, 23 bp, Artificial Sequence
  Synthetic oligonucleotide
  Full comp hsa-miR-6859-3p MIMAT0027619
ctacagaggcgacatgggggtca

SEQ ID NO: 4322 - DNA, 21 bp, Artificial Sequence
  Synthetic oligonucleotide
  Full comp hsa-miR-376a-3p MIMAT0000729
acgtggattttcctctatgat

SEQ ID NO: 4323 - DNA, 22 bp, Artificial Sequence
  Synthetic oligonucleotide
  Full comp hsa-miR-5000-5p MIMAT0021019
actcaggaacacttctgaactg

SEQ ID NO: 4324 - DNA, 23 bp, Artificial Sequence
  Synthetic oligonucleotide
  Full comp hsa-miR-3065-5p MIMAT0015066
tccagcatcagtgattttgttga

SEQ ID NO: 4325 - DNA, 24 bp, Artificial Sequence
  Synthetic oligonucleotide
  Full comp hsa-miR-6822-3p MIMAT0027545
tgcagggaaagccagttagagcct

SEQ ID NO: 4326 - DNA, 22 bp, Artificial Sequence
  Synthetic oligonucleotide
  Full comp hsa-miR-8086 MIMAT0031013
accatatcagtccagactagca

SEQ ID NO: 4327 - DNA, 22 bp, Artificial Sequence
  Synthetic oligonucleotide
  Full comp hsa-miR-125b-2-3p MIMAT0004603
gtcccaagagcctgacttgtga

SEQ ID NO: 4328 - DNA, 22 bp, Artificial Sequence
  Synthetic oligonucleotide
  Full comp hsa-miR-548am-5p MIMAT0022740
ggcaaaaaccgcaattactttt

SEQ ID NO: 4329 - DNA, 22 bp, Artificial Sequence
  Synthetic oligonucleotide
  Full comp hsa-miR-323b-3p MIMAT0015050
aagaggtcgaccgtgtattggg

SEQ ID NO: 4330 - DNA, 21 bp, Artificial Sequence
  Synthetic oligonucleotide
  Full comp hsa-miR-4489 MIMAT0019023
cgtcctgcatcactagcccca

SEQ ID NO: 4331 - DNA, 24 bp, Artificial Sequence
  Synthetic oligonucleotide
  Full comp hsa-miR-6862-3p MIMAT0027626
agagggccagagagctgggtgagg

SEQ ID NO: 4332 - DNA, 22 bp, Artificial Sequence
  Synthetic oligonucleotide
  Full comp hsa-miR-194-3p MIMAT0004671
cagataacagcagccccactgg

SEQ ID NO: 4333 - DNA, 22 bp, Artificial Sequence
  Synthetic oligonucleotide
  Full comp hsa-miR-6772-5p MIMAT0027444
cctcagctccagcctacaccca

SEQ ID NO: 4334 - DNA, 22 bp, Artificial Sequence
  Synthetic oligonucleotide
  Full comp hsa-miR-223-5p MIMAT0004570
aactcagcttgtcaaatacacg

SEQ ID NO: 4335 - DNA, 21 bp, Artificial Sequence
  Synthetic oligonucleotide
  Full comp hsa-miR-569 MIMAT0003234
actttccaggattcattaact

SEQ ID NO: 4336 - DNA, 23 bp, Artificial Sequence
  Synthetic oligonucleotide
  Full comp hsa-miR-4680-5p MIMAT0019764
acatctaagactgcaagagttct

SEQ ID NO: 4337 - DNA, 22 bp, Artificial Sequence
  Synthetic oligonucleotide
  Full comp hsa-miR-1914-3p MIMAT0007890
cctcccagtgcgggacccctcc

SEQ ID NO: 4338 - DNA, 22 bp, Artificial Sequence
  Synthetic oligonucleotide
  Full comp hsa-miR-4740-3p MIMAT0019870
gcagggacggatcctctcgggc

SEQ ID NO: 4339 - DNA, 22 bp, Artificial Sequence
  Synthetic oligonucleotide
  Full comp hsa-miR-518b MIMAT0002844
acctctaaaggggagcgctttg

SEQ ID NO: 4340 - DNA, 21 bp, Artificial Sequence
  Synthetic oligonucleotide
  Full comp hsa-miR-504-3p MIMAT0026612
gaaaccctgccctgcactccc

SEQ ID NO: 4341 - DNA, 21 bp, Artificial Sequence
  Synthetic oligonucleotide
  Full comp hsa-miR-149-3p MIMAT0004609
gcacagcccccgtccctccct

SEQ ID NO: 4342 - DNA, 21 bp, Artificial Sequence
  Synthetic oligonucleotide
  Full comp hsa-miR-26b-5p MIMAT0000083
acctatcctgaattacttgaa

SEQ ID NO: 4343 - DNA, 23 bp, Artificial Sequence
  Synthetic oligonucleotide
  Full comp hsa-miR-4758-5p MIMAT0019903
cagccccaccggctcccactcac

SEQ ID NO: 4344 - DNA, 20 bp, Artificial Sequence
  Synthetic oligonucleotide
  Full comp hsa-miR-5708 MIMAT0022502
ggtcaggcacagtcgctcat

SEQ ID NO: 4345 - DNA, 24 bp, Artificial Sequence
  Synthetic oligonucleotide
  Full comp hsa-miR-573 MIMAT0003238
ctgatcagttacacatcacttcag

SEQ ID NO: 4346 - DNA, 21 bp, Artificial Sequence
  Synthetic oligonucleotide
  Full comp hsa-miR-670-3p MIMAT0026640
tcctgaatgaatatgaggaaa

SEQ ID NO: 4347 - DNA, 22 bp, Artificial Sequence
  Synthetic oligonucleotide
  Full comp hsa-miR-1236-3p MIMAT0005591
ctggagagacaaggggaagagg

SEQ ID NO: 4348 - DNA, 21 bp, Artificial Sequence
  Synthetic oligonucleotide
  Full comp hsa-miR-3912-5p MIMAT0027036
actaacccataatatggacat

SEQ ID NO: 4349 - DNA, 22 bp, Artificial Sequence
  Synthetic oligonucleotide
  Full comp hsa-miR-3686 MIMAT0018114
tcatttactttctcttacagat

SEQ ID NO: 4350 - DNA, 21 bp, Artificial Sequence
  Synthetic oligonucleotide
  Full comp hsa-miR-4783-5p MIMAT0019946
agcccgggagctgggcgcgcc

SEQ ID NO: 4351 - DNA, 21 bp, Artificial Sequence
  Synthetic oligonucleotide
  Full comp hsa-miR-660-3p MIMAT0022711
taatccatgcacacaggaggt

SEQ ID NO: 4352 - DNA, 21 bp, Artificial Sequence
  Synthetic oligonucleotide
  Full comp hsa-miR-3655 MIMAT0018075
agcaacaccgcagcgacaagc

SEQ ID NO: 4353 - DNA, 21 bp, Artificial Sequence
  Synthetic oligonucleotide
  Full comp hsa-miR-4720-3p MIMAT0019834
atacttggtacaacttaagca

SEQ ID NO: 4354 - DNA, 21 bp, Artificial Sequence
  Synthetic oligonucleotide
  Full comp hsa-miR-1202 MIMAT0005865
ctcccccactgcagctggcac

SEQ ID NO: 4355 - DNA, 22 bp, Artificial Sequence
  Synthetic oligonucleotide
  Full comp hsa-miR-3160-5p MIMAT0019212
ggagagctgagactagaaagcc

SEQ ID NO: 4356 - DNA, 21 bp, Artificial Sequence
  Synthetic oligonucleotide
  Full comp hsa-miR-765 MIMAT0003945
catcaccttccttctcctcca

SEQ ID NO: 4357 - DNA, 21 bp, Artificial Sequence
  Synthetic oligonucleotide
  Full comp hsa-miR-628-3p MIMAT0003297
tcgactgccactcttactaga

SEQ ID NO: 4358 - DNA, 24 bp, Artificial Sequence
  Synthetic oligonucleotide
  Full comp hsa-miR-3687 MIMAT0018115
acgtcgcacgaacgcctgtccggg

SEQ ID NO: 4359 - DNA, 22 bp, Artificial Sequence
  Synthetic oligonucleotide
  Full comp hsa-miR-532-5p MIMAT0002888
acggtcctacactcaaggcatg

SEQ ID NO: 4360 - DNA, 23 bp, Artificial Sequence
  Synthetic oligonucleotide
  Full comp hsa-miR-3131 MIMAT0014996
aaggcccttccaccagtcctcga

SEQ ID NO: 4361 - DNA, 21 bp, Artificial Sequence
  Synthetic oligonucleotide
  Full comp hsa-miR-296-5p MIMAT0000690
acaggattgagggggggccct

SEQ ID NO: 4362 - DNA, 22 bp, Artificial Sequence
  Synthetic oligonucleotide
  Full comp hsa-miR-378a-5p MIMAT0000731
acacaggacctggagtcaggag

SEQ ID NO: 4363 - DNA, 21 bp, Artificial Sequence
  Synthetic oligonucleotide
  Full comp hsa-miR-6769a-3p MIMAT0027439
ctggagagcagagaggggctc

SEQ ID NO: 4364 - DNA, 20 bp, Artificial Sequence
  Synthetic oligonucleotide
  Full comp hsa-miR-6802-5p MIMAT0027504
gcttcaagccccccacctag

SEQ ID NO: 4365 - DNA, 23 bp, Artificial Sequence
  Synthetic oligonucleotide
  Full comp hsa-miR-1911-5p MIMAT0007885
cccaacagacatggcggtactca

SEQ ID NO: 4366 - DNA, 19 bp, Artificial Sequence
  Synthetic oligonucleotide
  Full comp hsa-miR-6128 MIMAT0024611
ttttgactccaattccagt

SEQ ID NO: 4367 - DNA, 23 bp, Artificial Sequence
  Synthetic oligonucleotide
  Full comp hsa-miR-20a-5p MIMAT0000075
ctacctgcactataagcacttta

SEQ ID NO: 4368 - DNA, 22 bp, Artificial Sequence
  Synthetic oligonucleotide
  Full comp hsa-miR-5586-5p MIMAT0022287
gcatatagtaacaagctggata

SEQ ID NO: 4369 - DNA, 20 bp, Artificial Sequence
  Synthetic oligonucleotide
  Full comp hsa-miR-4790-5p MIMAT0019961
aacatgaatggtaaagcgat

SEQ ID NO: 4370 - DNA, 21 bp, Artificial Sequence
  Synthetic oligonucleotide
  Full comp hsa-miR-188-3p MIMAT0004613
tgcaaaccctgcatgtgggag

SEQ ID NO: 4371 - DNA, 21 bp, Artificial Sequence
  Synthetic oligonucleotide
  Full comp hsa-miR-21-3p MIMAT0004494
acagcccatcgactggtgttg

SEQ ID NO: 4372 - DNA, 22 bp, Artificial Sequence
  Synthetic oligonucleotide
  Full comp hsa-miR-4654 MIMAT0019720
ccagatgcctccagatcccaca

SEQ ID NO: 4373 - DNA, 23 bp, Artificial Sequence
  Synthetic oligonucleotide
  Full comp hsa-miR-6859-5p MIMAT0027618
tgtcctgagcccatgttcctctc

SEQ ID NO: 4374 - DNA, 22 bp, Artificial Sequence
  Synthetic oligonucleotide
  Full comp hsa-miR-550b-2-5p MIMAT0022737
tgtcttactccctcaggcacat

SEQ ID NO: 4375 - DNA, 25 bp, Artificial Sequence
  Synthetic oligonucleotide
  Full comp hsa-miR-6782-5p MIMAT0027464
acacccctgaattcccccaccccta

SEQ ID NO: 4376 - DNA, 22 bp, Artificial Sequence
  Synthetic oligonucleotide
  Full comp hsa-miR-4527 MIMAT0019066
acagtcatctctttgcagacca

SEQ ID NO: 4377 - DNA, 21 bp, Artificial Sequence
  Synthetic oligonucleotide
  Full comp hsa-miR-2117 MIMAT0011162
ctgtccttggcaaagagaaca

SEQ ID NO: 4378 - DNA, 22 bp, Artificial Sequence
  Synthetic oligonucleotide
  Full comp hsa-miR-2355-3p MIMAT0017950
atctccaaacagcaaggacaat

SEQ ID NO: 4379 - DNA, 22 bp, Artificial Sequence
  Synthetic oligonucleotide
  Full comp hsa-miR-148b-3p MIMAT0000759
acaaagttctgtgatgcactga

SEQ ID NO: 4380 - DNA, 21 bp, Artificial Sequence
  Synthetic oligonucleotide
  Full comp hsa-miR-6864-3p MIMAT0027629
ctgaagggagagaagtctcac

SEQ ID NO: 4381 - DNA, 21 bp, Artificial Sequence
  Synthetic oligonucleotide
  Full comp hsa-miR-590-3p MIMAT0004801
actagcttatacataaaatta

SEQ ID NO: 4382 - DNA, 22 bp, Artificial Sequence
  Synthetic oligonucleotide
  Full comp hsa-miR-100-5p MIMAT0000098
cacaagttcggatctacgggtt

SEQ ID NO: 4383 - DNA, 23 bp, Artificial Sequence
  Synthetic oligonucleotide
  Full comp hsa-miR-548u MIMAT0015013
cgcaaaagtaattgcagtctttg

SEQ ID NO: 4384 - DNA, 21 bp, Artificial Sequence
  Synthetic oligonucleotide
  Full comp hsa-miR-5589-5p MIMAT0022297
actgcacaagagcacccagcc

SEQ ID NO: 4385 - DNA, 23 bp, Artificial Sequence
  Synthetic oligonucleotide
  Full comp hsa-miR-6837-3p MIMAT0027577
ctgcagcagagtcacagtgaagg

SEQ ID NO: 4386 - DNA, 25 bp, Artificial Sequence
  Synthetic oligonucleotide
  Full comp hsa-miR-6774-5p MIMAT0027448
catacagggtccctcctgcccaagt

SEQ ID NO: 4387 - DNA, 18 bp, Artificial Sequence
  Synthetic oligonucleotide
  Full comp hsa-miR-4263 MIMAT0016898
ggccaaggcacttagaat

SEQ ID NO: 4388 - DNA, 24 bp, Artificial Sequence
  Synthetic oligonucleotide
  Full comp hsa-miR-8074 MIMAT0031001
gagtacatgccagtctcgccatag

SEQ ID NO: 4389 - DNA, 21 bp, Artificial Sequence
  Synthetic oligonucleotide
  Full comp hsa-miR-6808-3p MIMAT0027517
ctgcaggaacggtggtcacac

SEQ ID NO: 4390 - DNA, 21 bp, Artificial Sequence
  Synthetic oligonucleotide
  Full comp hsa-miR-4666a-5p MIMAT0019741
ggcatacaatctgacatgtat

SEQ ID NO: 4391 - DNA, 23 bp, Artificial Sequence
  Synthetic oligonucleotide
  Full comp hsa-miR-6743-3p MIMAT0027388
tgtgggcagggagaagagcggct

SEQ ID NO: 4392 - DNA, 21 bp, Artificial Sequence
  Synthetic oligonucleotide
  Full comp hsa-miR-511-5p MIMAT0002808
tgactgcagagcaaaagacac

SEQ ID NO: 4393 - DNA, 23 bp, Artificial Sequence
  Synthetic oligonucleotide
  Full comp hsa-miR-4632-5p MIMAT0022977
tccgccacacccacgctgccctc

SEQ ID NO: 4394 - DNA, 23 bp, Artificial Sequence
  Synthetic oligonucleotide
  Full comp hsa-miR-301a-3p MIMAT0000688
gctttgacaatactattgcactg

SEQ ID NO: 4395 - DNA, 22 bp, Artificial Sequence
  Synthetic oligonucleotide
  Full comp hsa-miR-1200 MIMAT0005863
gaggctcagaatggctcaggag

SEQ ID NO: 4396 - DNA, 23 bp, Artificial Sequence
  Synthetic oligonucleotide
  Full comp hsa-miR-3199 MIMAT0015084
aactttctcctaaggcagtccct

SEQ ID NO: 4397 - DNA, 21 bp, Artificial Sequence
  Synthetic oligonucleotide
  Full comp hsa-miR-152-3p MIMAT0000438
ccaagttctgtcatgcactga

SEQ ID NO: 4398 - DNA, 22 bp, Artificial Sequence
  Synthetic oligonucleotide
  Full comp hsa-miR-361-5p MIMAT0000703
gtacccctggagattctgataa

SEQ ID NO: 4399 - DNA, 21 bp, Artificial Sequence
  Synthetic oligonucleotide
  Full comp hsa-miR-1199-3p MIMAT0031120
gcaggttgagcaccggccgca

SEQ ID NO: 4400 - DNA, 21 bp, Artificial Sequence
  Synthetic oligonucleotide
  Full comp hsa-miR-6751-3p MIMAT0027403
ctggagagagagaggctcagt

SEQ ID NO: 4401 - DNA, 22 bp, Artificial Sequence
  Synthetic oligonucleotide
  Full comp hsa-miR-6757-3p MIMAT0027415
tggggatagcaaggccagtgtt

SEQ ID NO: 4402 - DNA, 22 bp, Artificial Sequence
  Synthetic oligonucleotide
  Full comp hsa-miR-6871-5p MIMAT0027642
gcaaccaccccgaactcccatg

SEQ ID NO: 4403 - DNA, 21 bp, Artificial Sequence
  Synthetic oligonucleotide
  Full comp hsa-miR-656-3p MIMAT0003332
agaggttgactgtataatatt

SEQ ID NO: 4404 - DNA, 23 bp, Artificial Sequence
  Synthetic oligonucleotide
  Full comp hsa-miR-4728-5p MIMAT0019849
tgcttgctgcctctcccctccca

SEQ ID NO: 4405 - DNA, 22 bp, Artificial Sequence
  Synthetic oligonucleotide
  Full comp hsa-miR-23c MIMAT0018000
gggtaatcactggcaatgtgat

SEQ ID NO: 4406 - DNA, 21 bp, Artificial Sequence
  Synthetic oligonucleotide
  Full comp hsa-miR-4717-3p MIMAT0019830
aggccacagccacccatgtgt

SEQ ID NO: 4407 - DNA, 22 bp, Artificial Sequence
  Synthetic oligonucleotide
  Full comp hsa-miR-517c-3p MIMAT0002866
acactctaaaaggatgcacgat

SEQ ID NO: 4408 - DNA, 22 bp, Artificial Sequence
  Synthetic oligonucleotide
  Full comp hsa-miR-520c-3p MIMAT0002846
accctctaaaaggaagcacttt

SEQ ID NO: 4409 - DNA, 24 bp, Artificial Sequence
  Synthetic oligonucleotide
  Full comp hsa-miR-6854-5p MIMAT0027608
tcagcagttctcaaacctgagctt

SEQ ID NO: 4410 - DNA, 22 bp, Artificial Sequence
  Synthetic oligonucleotide
  Full comp hsa-miR-6849-3p MIMAT0027599
ctggaggtggacacaggctggt

SEQ ID NO: 4411 - DNA, 16 bp, Artificial Sequence
  Synthetic oligonucleotide
  Full comp hsa-miR-4310 MIMAT0016862
gggacatgaatgctgc

SEQ ID NO: 4412 - DNA, 21 bp, Artificial Sequence
  Synthetic oligonucleotide
  Full comp hsa-miR-5591-5p MIMAT0022301
atacccatagcttagctccca

SEQ ID NO: 4413 - DNA, 22 bp, Artificial Sequence
  Synthetic oligonucleotide
  Full comp hsa-miR-509-3p MIMAT0002881
ctacccacagacgtaccaatca

SEQ ID NO: 4414 - DNA, 21 bp, Artificial Sequence
  Synthetic oligonucleotide
  Full comp hsa-miR-4277 MIMAT0016908
gtgtactgtgctcagaactgc

SEQ ID NO: 4415 - DNA, 22 bp, Artificial Sequence
  Synthetic oligonucleotide
  Full comp hsa-miR-4722-3p MIMAT0019837
ctgcagggaggtgctggcaggt

SEQ ID NO: 4416 - DNA, 22 bp, Artificial Sequence
  Synthetic oligonucleotide
  Full comp hsa-miR-6729-5p MIMAT0027359
gccgctcagccgccctcgccca

SEQ ID NO: 4417 - DNA, 22 bp, Artificial Sequence
  Synthetic oligonucleotide
  Full comp hsa-miR-4496 MIMAT0019031
ccctctcagcttcagtttcctc

SEQ ID NO: 4418 - DNA, 22 bp, Artificial Sequence
  Synthetic oligonucleotide
  Full comp hsa-miR-4764-3p MIMAT0019915
ccatgggtgtgaaaggagttaa

SEQ ID NO: 4419 - DNA, 22 bp, Artificial Sequence
  Synthetic oligonucleotide
  Full comp hsa-miR-4782-5p MIMAT0019944
ttgattgtcttcatatccagaa

SEQ ID NO: 4420 - DNA, 22 bp, Artificial Sequence
  Synthetic oligonucleotide
  Full comp hsa-miR-708-3p MIMAT0004927
ctagaagctcacagtctagttg

SEQ ID NO: 4421 - DNA, 22 bp, Artificial Sequence
  Synthetic oligonucleotide
  Full comp hsa-miR-1323 MIMAT0005795
agaaaatgcccctcagttttga

SEQ ID NO: 4422 - DNA, 22 bp, Artificial Sequence
  Synthetic oligonucleotide
  Full comp hsa-let-7i-5p MIMAT0000415
aacagcacaaactactacctca

SEQ ID NO: 4423 - DNA, 20 bp, Artificial Sequence
  Synthetic oligonucleotide
  Full comp hsa-miR-384 MIMAT0001075
tatgaacaatttctaggaat

SEQ ID NO: 4424 - DNA, 18 bp, Artificial Sequence
  Synthetic oligonucleotide
  Full comp hsa-miR-4292 MIMAT0016919
ccaaggccggcccagggg

SEQ ID NO: 4425 - DNA, 21 bp, Artificial Sequence
  Synthetic oligonucleotide
  Full comp hsa-miR-1273g-3p MIMAT0022742
ctcaggctggagtgcagtggt

SEQ ID NO: 4426 - DNA, 22 bp, Artificial Sequence
  Synthetic oligonucleotide
  Full comp hsa-miR-4699-3p MIMAT0019795
ggagaagattgcagagtaaatt

SEQ ID NO: 4427 - DNA, 20 bp, Artificial Sequence
  Synthetic oligonucleotide
  Full comp hsa-miR-500b-3p MIMAT0027032
cagaatccttgcctgggtgc

SEQ ID NO: 4428 - DNA, 22 bp, Artificial Sequence
  Synthetic oligonucleotide
  Full comp hsa-miR-1252-5p MIMAT0005944
taaatgaattcaatttccttct

SEQ ID NO: 4429 - DNA, 22 bp, Artificial Sequence
  Synthetic oligonucleotide
  Full comp hsa-miR-4802-5p MIMAT0019981
aacatggtctagaacctccata

SEQ ID NO: 4430 - DNA, 22 bp, Artificial Sequence
  Synthetic oligonucleotide
  Full comp hsa-miR-4509 MIMAT0019046
aaaaccttctatatcctttagt

SEQ ID NO: 4431 - DNA, 19 bp, Artificial Sequence
  Synthetic oligonucleotide
  Full comp hsa-miR-6090 MIMAT0023715
gccccgcccctcgctcccc

SEQ ID NO: 4432 - DNA, 22 bp, Artificial Sequence
  Synthetic oligonucleotide
  Full comp hsa-miR-654-3p MIMAT0004814
aaggtgatggtcagcagacata

SEQ ID NO: 4433 - DNA, 22 bp, Artificial Sequence
  Synthetic oligonucleotide
  Full comp hsa-miR-4679 MIMAT0019763
agcaaagaatctctatcacaga

SEQ ID NO: 4434 - DNA, 22 bp, Artificial Sequence
  Synthetic oligonucleotide
  Full comp hsa-miR-429 MIMAT0001536
acggttttaccagacagtatta

SEQ ID NO: 4435 - DNA, 22 bp, Artificial Sequence
  Synthetic oligonucleotide
  Full comp hsa-miR-584-3p MIMAT0022708
agcctggttggcctggaactga

SEQ ID NO: 4436 - DNA, 23 bp, Artificial Sequence
  Synthetic oligonucleotide
  Full comp hsa-miR-508-3p MIMAT0002880
tctactccaaaaggctacaatca

SEQ ID NO: 4437 - DNA, 22 bp, Artificial Sequence
  Synthetic oligonucleotide
  Full comp hsa-miR-4655-5p MIMAT0019721
cgaccctctgccatccccggtg

SEQ ID NO: 4438 - DNA, 22 bp, Artificial Sequence
  Synthetic oligonucleotide
  Full comp hsa-miR-6808-5p MIMAT0027516
catggtcccacctccctgcctg

SEQ ID NO: 4439 - DNA, 21 bp, Artificial Sequence
  Synthetic oligonucleotide
  Full comp hsa-miR-4762-5p MIMAT0019910
aggcttctgatcaagatttgg

SEQ ID NO: 4440 - DNA, 21 bp, Artificial Sequence
  Synthetic oligonucleotide
  Full comp hsa-miR-6837-5p MIMAT0027576
acattccctgctggccctggt

SEQ ID NO: 4441 - DNA, 22 bp, Artificial Sequence
  Synthetic oligonucleotide
  Full comp hsa-miR-200b-5p MIMAT0004571
tccaatgctgcccagtaagatg

SEQ ID NO: 4442 - DNA, 20 bp, Artificial Sequence
  Synthetic oligonucleotide
  Full comp hsa-miR-6801-3p MIMAT0027503
ggccagtgagtggcaggggt

SEQ ID NO: 4443 - DNA, 22 bp, Artificial Sequence
  Synthetic oligonucleotide
  Full comp hsa-miR-548d-5p MIMAT0004812
ggcaaaaaccacaattactttt

SEQ ID NO: 4444 - DNA, 22 bp, Artificial Sequence
  Synthetic oligonucleotide
  Full comp hsa-miR-3157-3p MIMAT0019210
agcttcagctagactagggcag

SEQ ID NO: 4445 - DNA, 23 bp, Artificial Sequence
  Synthetic oligonucleotide
  Full comp hsa-miR-324-5p MIMAT0000761
acaccaatgccctaggggatgcg

SEQ ID NO: 4446 - DNA, 22 bp, Artificial Sequence
  Synthetic oligonucleotide
  Full comp hsa-miR-26a-1-3p MIMAT0004499
cgtgcaagtaaccaagaatagg

SEQ ID NO: 4447 - DNA, 20 bp, Artificial Sequence
  Synthetic oligonucleotide
  Full comp hsa-miR-3713 MIMAT0018164
accatccccaaacggatacc

SEQ ID NO: 4448 - DNA, 21 bp, Artificial Sequence
  Synthetic oligonucleotide
  Full comp hsa-miR-4280 MIMAT0016911
gctctgctcagaactacactc

SEQ ID NO: 4449 - DNA, 22 bp, Artificial Sequence
  Synthetic oligonucleotide
  Full comp hsa-miR-6743-5p MIMAT0027387
gggccacccgtccctgcccctt

SEQ ID NO: 4450 - DNA, 25 bp, Artificial Sequence
  Synthetic oligonucleotide
  Full comp hsa-miR-6855-5p MIMAT0027610
gcaatgtctgcaccccaaaccccaa

SEQ ID NO: 4451 - DNA, 22 bp, Artificial Sequence
  Synthetic oligonucleotide
  Full comp hsa-miR-1294 MIMAT0005884
agacaacaatgccaacctcaca

SEQ ID NO: 4452 - DNA, 22 bp, Artificial Sequence
  Synthetic oligonucleotide
  Full comp hsa-miR-5696 MIMAT0022489
ggcatcagactacttaaatgag

SEQ ID NO: 4453 - DNA, 24 bp, Artificial Sequence
  Synthetic oligonucleotide
  Full comp hsa-miR-7158-5p MIMAT0028226
ggctgcaggaccagagattgagcc

SEQ ID NO: 4454 - DNA, 25 bp, Artificial Sequence
  Synthetic oligonucleotide
  Full comp hsa-miR-548aa MIMAT0018447
tggtgcaaaagtaattgtggttttt

SEQ ID NO: 4455 - DNA, 22 bp, Artificial Sequence
  Synthetic oligonucleotide
  Full comp hsa-miR-3157-5p MIMAT0015031
agactgcactagcctggctgaa

SEQ ID NO: 4456 - DNA, 22 bp, Artificial Sequence
  Synthetic oligonucleotide
  Full comp hsa-miR-154-3p MIMAT0000453
aataggtcaaccgtgtatgatt

SEQ ID NO: 4457 - DNA, 22 bp, Artificial Sequence
  Synthetic oligonucleotide
  Full comp hsa-miR-122-3p MIMAT0004590
tatttagtgtgataatggcgtt

SEQ ID NO: 4458 - DNA, 23 bp, Artificial Sequence
  Synthetic oligonucleotide
  Full comp hsa-miR-1270 MIMAT0005924
acacagctcttccatatctccag

SEQ ID NO: 4459 - DNA, 23 bp, Artificial Sequence
  Synthetic oligonucleotide
  Full comp hsa-miR-769-3p MIMAT0003887
aaccaagaccccggagatcccag

SEQ ID NO: 4460 - DNA, 17 bp, Artificial Sequence
  Synthetic oligonucleotide
  Full comp hsa-miR-3168 MIMAT0015043
gtctgactgtagaactc

SEQ ID NO: 4461 - DNA, 21 bp, Artificial Sequence
  Synthetic oligonucleotide
  Full comp hsa-miR-143-3p MIMAT0000435
gagctacagtgcttcatctca

SEQ ID NO: 4462 - DNA, 23 bp, Artificial Sequence
  Synthetic oligonucleotide
  Full comp hsa-miR-6874-5p MIMAT0027648
gcctgatctggttccagctccat

SEQ ID NO: 4463 - DNA, 18 bp, Artificial Sequence
  Synthetic oligonucleotide
  Full comp hsa-miR-516b-3p MIMAT0002860
accctctgaaaggaagca

SEQ ID NO: 4464 - DNA, 23 bp, Artificial Sequence
  Synthetic oligonucleotide
  Full comp hsa-miR-10b-5p MIMAT0000254
cacaaattcggttctacagggta

SEQ ID NO: 4465 - DNA, 22 bp, Artificial Sequence
  Synthetic oligonucleotide
  Full comp hsa-miR-4677-5p MIMAT0019760
tggctgaaagaccaaagaacaa

SEQ ID NO: 4466 - DNA, 23 bp, Artificial Sequence
  Synthetic oligonucleotide
  Full comp hsa-miR-7705 MIMAT0030020
cagaactgacattctgagctatt

SEQ ID NO: 4467 - DNA, 22 bp, Artificial Sequence
  Synthetic oligonucleotide
  Full comp hsa-miR-6847-3p MIMAT0027595
gaagaggacagacacatgagcc

SEQ ID NO: 4468 - DNA, 22 bp, Artificial Sequence
  Synthetic oligonucleotide
  Full comp hsa-miR-6755-5p MIMAT0027410
aacgttgtcagtgtctacccta

SEQ ID NO: 4469 - DNA, 22 bp, Artificial Sequence
  Synthetic oligonucleotide
  Full comp hsa-miR-512-3p MIMAT0002823
gacctcagctatgacagcactt

SEQ ID NO: 4470 - DNA, 22 bp, Artificial Sequence
  Synthetic oligonucleotide
  Full comp hsa-miR-153-3p MIMAT0000439
gatcacttttgtgactatgcaa

SEQ ID NO: 4471 - DNA, 20 bp, Artificial Sequence
  Synthetic oligonucleotide
  Full comp hsa-miR-4454 MIMAT0018976
tggtgccgtgactcggatcc

SEQ ID NO: 4472 - DNA, 20 bp, Artificial Sequence
  Synthetic oligonucleotide
  Full comp hsa-miR-8064 MIMAT0030991
gtccgctcgctcagtgtgct

SEQ ID NO: 4473 - DNA, 22 bp, Artificial Sequence
  Synthetic oligonucleotide
  Full comp hsa-miR-7110-3p MIMAT0028118
ctgcagggaagtgggagagaga

SEQ ID NO: 4474 - DNA, 23 bp, Artificial Sequence
  Synthetic oligonucleotide
  Full comp hsa-miR-423-3p MIMAT0001340
actgaggggcctcagaccgagct

SEQ ID NO: 4475 - DNA, 22 bp, Artificial Sequence
  Synthetic oligonucleotide
  Full comp hsa-miR-331-5p MIMAT0004700
ggatccctgggaccatacctag

SEQ ID NO: 4476 - DNA, 21 bp, Artificial Sequence
  Synthetic oligonucleotide
  Full comp hsa-miR-190a-3p MIMAT0026482
aggaatatgtttgatatatag

SEQ ID NO: 4477 - DNA, 21 bp, Artificial Sequence
  Synthetic oligonucleotide
  Full comp hsa-miR-610 MIMAT0003278
tcccagcacacatttagctca

SEQ ID NO: 4478 - DNA, 22 bp, Artificial Sequence
  Synthetic oligonucleotide
  Full comp hsa-miR-198 MIMAT0000228
gaacctatctcccctctggacc

SEQ ID NO: 4479 - DNA, 21 bp, Artificial Sequence
  Synthetic oligonucleotide
  Full comp hsa-miR-4536-5p MIMAT0019078
atcgtgcatatatctaccaca

SEQ ID NO: 4480 - DNA, 22 bp, Artificial Sequence
  Synthetic oligonucleotide
  Full comp hsa-miR-4760-5p MIMAT0019906
ctaacttcatgttcaatctaaa

SEQ ID NO: 4481 - DNA, 22 bp, Artificial Sequence
  Synthetic oligonucleotide
  Full comp hsa-miR-3924 MIMAT0018199
agtagcagtcacatatacatat

SEQ ID NO: 4482 - DNA, 20 bp, Artificial Sequence
  Synthetic oligonucleotide
  Full comp hsa-miR-5692b MIMAT0022497
acacctactgtgatattatt

SEQ ID NO: 4483 - DNA, 22 bp, Artificial Sequence
  Synthetic oligonucleotide
  Full comp hsa-miR-6742-5p MIMAT0027385
aacagctgggtcccaccccact

SEQ ID NO: 4484 - DNA, 25 bp, Artificial Sequence
  Synthetic oligonucleotide
  Full comp hsa-miR-612 MIMAT0003280
aaggagctcagaagccctgcccagc

SEQ ID NO: 4485 - DNA, 23 bp, Artificial Sequence
  Synthetic oligonucleotide
  Full comp hsa-miR-935 MIMAT0004978
gcggtagcggaagcggtaactgg

SEQ ID NO: 4486 - DNA, 24 bp, Artificial Sequence
  Synthetic oligonucleotide
  Full comp hsa-miR-8089 MIMAT0031016
ctgccccaatcccctgtccccagg

SEQ ID NO: 4487 - DNA, 21 bp, Artificial Sequence
  Synthetic oligonucleotide
  Full comp hsa-miR-6774-3p MIMAT0027449
ctgtggacaagagggacacga

SEQ ID NO: 4488 - DNA, 22 bp, Artificial Sequence
  Synthetic oligonucleotide
  Full comp hsa-miR-4503 MIMAT0019039
taaattctatttcctgcttaaa

SEQ ID NO: 4489 - DNA, 22 bp, Artificial Sequence
  Synthetic oligonucleotide
  Full comp hsa-miR-762 MIMAT0010313
gctcggccccggccccagcccc

SEQ ID NO: 4490 - DNA, 22 bp, Artificial Sequence
  Synthetic oligonucleotide
  Full comp hsa-miR-150-3p MIMAT0004610
ctgtcccccaggcctgtaccag

SEQ ID NO: 4491 - DNA, 22 bp, Artificial Sequence
  Synthetic oligonucleotide
  Full comp hsa-miR-548aq-5p MIMAT0022263
ggcaaaaacagcaattactttc

SEQ ID NO: 4492 - DNA, 20 bp, Artificial Sequence
  Synthetic oligonucleotide
  Full comp hsa-miR-4999-3p MIMAT0021018
actgtattgtcaggtagtga

SEQ ID NO: 4493 - DNA, 21 bp, Artificial Sequence
  Synthetic oligonucleotide
  Full comp hsa-miR-3130-5p MIMAT0014995
ggctgcaccggagactgggta

SEQ ID NO: 4494 - DNA, 22 bp, Artificial Sequence
  Synthetic oligonucleotide
  Full comp hsa-miR-6883-3p MIMAT0027667
ctgaggagagtgagatagggaa

SEQ ID NO: 4495 - DNA, 22 bp, Artificial Sequence
  Synthetic oligonucleotide
  Full comp hsa-miR-497-3p MIMAT0004768
tctaacaccacagtgtggtttg

SEQ ID NO: 4496 - DNA, 22 bp, Artificial Sequence
  Synthetic oligonucleotide
  Full comp hsa-miR-3689c MIMAT0019007
accacaatatcacacctcccag

SEQ ID NO: 4497 - DNA, 22 bp, Artificial Sequence
  Synthetic oligonucleotide
  Full comp hsa-miR-8082 MIMAT0031009
cagagtattcccagctccatca

SEQ ID NO: 4498 - DNA, 22 bp, Artificial Sequence
  Synthetic oligonucleotide
  Full comp hsa-miR-548bb-3p MIMAT0035704
gcaaaagtaactatggtttttg

SEQ ID NO: 4499 - DNA, 22 bp, Artificial Sequence
  Synthetic oligonucleotide
  Full comp hsa-miR-6818-5p MIMAT0027536
gatgctctctgtactcacacaa

SEQ ID NO: 4500 - DNA, 23 bp, Artificial Sequence
  Synthetic oligonucleotide
  Full comp hsa-miR-6506-5p MIMAT0025468
accatattcagtgacatcccagt

SEQ ID NO: 4501 - DNA, 18 bp, Artificial Sequence
  Synthetic oligonucleotide
  Full comp hsa-miR-4315 MIMAT0016866
gtccagctcagaaagcgg

SEQ ID NO: 4502 - DNA, 21 bp, Artificial Sequence
  Synthetic oligonucleotide
  Full comp hsa-miR-676-3p MIMAT0018204
aactcaacaaccttaggacag

SEQ ID NO: 4503 - DNA, 22 bp, Artificial Sequence
  Synthetic oligonucleotide
  Full comp hsa-miR-6508-3p MIMAT0025473
agttctagaaatgcatggccca

SEQ ID NO: 4504 - DNA, 19 bp, Artificial Sequence
  Synthetic oligonucleotide
  Full comp hsa-miR-3181 MIMAT0015061
ccggcgccgagggcccgat

SEQ ID NO: 4505 - DNA, 22 bp, Artificial Sequence
  Synthetic oligonucleotide
  Full comp hsa-miR-3927-3p MIMAT0018202
atgcctatcaaatatctacctg

SEQ ID NO: 4506 - DNA, 22 bp, Artificial Sequence
  Synthetic oligonucleotide
  Full comp hsa-miR-5193 MIMAT0021124
actgggatgaggtagaggagga

SEQ ID NO: 4507 - DNA, 22 bp, Artificial Sequence
  Synthetic oligonucleotide
  Full comp hsa-miR-7843-5p MIMAT0030411
tcaggaagctggctctgccctc

SEQ ID NO: 4508 - DNA, 22 bp, Artificial Sequence
  Synthetic oligonucleotide
  Full comp hsa-miR-6781-3p MIMAT0027463
ctgaggccgtggaaaagaggca

SEQ ID NO: 4509 - DNA, 22 bp, Artificial Sequence
  Synthetic oligonucleotide
  Full comp hsa-miR-376b-3p MIMAT0002172
aacatggattttcctctatgat

SEQ ID NO: 4510 - DNA, 22 bp, Artificial Sequence
  Synthetic oligonucleotide
  Full comp hsa-miR-4259 MIMAT0016880
tcctgacccctagacccaactg

SEQ ID NO: 4511 - DNA, 19 bp, Artificial Sequence
  Synthetic oligonucleotide
  Full comp hsa-miR-566 MIMAT0003230
gttgggatcacaggcgccc

SEQ ID NO: 4512 - DNA, 20 bp, Artificial Sequence
  Synthetic oligonucleotide
  Full comp hsa-miR-371a-5p MIMAT0004687
agtgcccccacagtttgagt

SEQ ID NO: 4513 - DNA, 22 bp, Artificial Sequence
  Synthetic oligonucleotide
  Full comp hsa-miR-548e-5p MIMAT0026736
gcaaaaaccgcgattgcttttg

SEQ ID NO: 4514 - DNA, 22 bp, Artificial Sequence
  Synthetic oligonucleotide
  Full comp hsa-miR-651-5p MIMAT0003321
caaaagtcaagcttatcctaaa

SEQ ID NO: 4515 - DNA, 22 bp, Artificial Sequence
  Synthetic oligonucleotide
  Full comp hsa-miR-422a MIMAT0001339
gccttctgaccctaagtccagt

SEQ ID NO: 4516 - DNA, 22 bp, Artificial Sequence
  Synthetic oligonucleotide
  Full comp hsa-miR-4642 MIMAT0019702
agccaccaggggacgatgccat

SEQ ID NO: 4517 - DNA, 21 bp, Artificial Sequence
  Synthetic oligonucleotide
  Full comp hsa-miR-4724-3p MIMAT0019842
actagctgaaccagaaggtac

SEQ ID NO: 4518 - DNA, 21 bp, Artificial Sequence
  Synthetic oligonucleotide
  Full comp hsa-miR-7160-3p MIMAT0028231
tctgctaaagccagggccctg

SEQ ID NO: 4519 - DNA, 19 bp, Artificial Sequence
  Synthetic oligonucleotide
  Full comp hsa-miR-6744-5p MIMAT0027389
aggcctccactgtcatcca

SEQ ID NO: 4520 - DNA, 22 bp, Artificial Sequence
  Synthetic oligonucleotide
  Full comp hsa-miR-4524a-3p MIMAT0019063
atagcagcataagcctgtctca

SEQ ID NO: 4521 - DNA, 22 bp, Artificial Sequence
  Synthetic oligonucleotide
  Full comp hsa-miR-873-3p MIMAT0022717
tcccgggaactcatcagtctcc

SEQ ID NO: 4522 - DNA, 22 bp, Artificial Sequence
  Synthetic oligonucleotide
  Full comp hsa-miR-362-3p MIMAT0004683
tgaatccttgaataggtgtgtt

SEQ ID NO: 4523 - DNA, 23 bp, Artificial Sequence
  Synthetic oligonucleotide
  Full comp hsa-miR-4758-3p MIMAT0019904
gagggtggtcagcaggtggggca

SEQ ID NO: 4524 - DNA, 22 bp, Artificial Sequence
  Synthetic oligonucleotide
  Full comp hsa-miR-1263 MIMAT0005915
actcagtatgccagggtaccat

SEQ ID NO: 4525 - DNA, 22 bp, Artificial Sequence
  Synthetic oligonucleotide
  Full comp hsa-miR-6512-3p MIMAT0025481
cctaccattagaagggctggaa

SEQ ID NO: 4526 - DNA, 20 bp, Artificial Sequence
  Synthetic oligonucleotide
  Full comp hsa-miR-6073 MIMAT0023698
gtagctgataactcactacc

SEQ ID NO: 4527 - DNA, 20 bp, Artificial Sequence
  Synthetic oligonucleotide
  Full comp hsa-miR-670-5p MIMAT0010357
caccacatacactcagggac

SEQ ID NO: 4528 - DNA, 21 bp, Artificial Sequence
  Synthetic oligonucleotide
  Full comp hsa-miR-1257 MIMAT0005908
ggtcagaacccatcattcact

SEQ ID NO: 4529 - DNA, 22 bp, Artificial Sequence
  Synthetic oligonucleotide
  Full comp hsa-miR-3911 MIMAT0018185
tgcctcctccaggatccacaca

SEQ ID NO: 4530 - DNA, 20 bp, Artificial Sequence
  Synthetic oligonucleotide
  Full comp hsa-miR-4429 MIMAT0018944
cgcctctcagcccagctttt

SEQ ID NO: 4531 - DNA, 23 bp, Artificial Sequence
  Synthetic oligonucleotide
  Full comp hsa-miR-4711-5p MIMAT0019816
ctcatgtcttctggcctgatgca

SEQ ID NO: 4532 - DNA, 22 bp, Artificial Sequence
  Synthetic oligonucleotide
  Full comp hsa-miR-3646 MIMAT0018065
tgggctgggctcatttcatttt

SEQ ID NO: 4533 - DNA, 19 bp, Artificial Sequence
  Synthetic oligonucleotide
  Full comp hsa-miR-6085 MIMAT0023710
tgtgctcccccagcccctt

SEQ ID NO: 4534 - DNA, 22 bp, Artificial Sequence
  Synthetic oligonucleotide
  Full comp hsa-miR-4459 MIMAT0018981
ctccacctcctccgcctcctgg

SEQ ID NO: 4535 - DNA, 22 bp, Artificial Sequence
  Synthetic oligonucleotide
  Full comp hsa-miR-4667-5p MIMAT0019743
ggttctccttctgctccccagt

SEQ ID NO: 4536 - DNA, 22 bp, Artificial Sequence
  Synthetic oligonucleotide
  Full comp hsa-miR-146b-5p MIMAT0002809
agcctatggaattcagttctca

SEQ ID NO: 4537 - DNA, 23 bp, Artificial Sequence
  Synthetic oligonucleotide
  Full comp hsa-miR-6730-5p MIMAT0027361
tctgacaacccctccacctttct

SEQ ID NO: 4538 - DNA, 22 bp, Artificial Sequence
  Synthetic oligonucleotide
  Full comp hsa-miR-378a-3p MIMAT0000732
gccttctgactccaagtccagt

SEQ ID NO: 4539 - DNA, 19 bp, Artificial Sequence
  Synthetic oligonucleotide
  Full comp hsa-miR-3650 MIMAT0018070
ggactctacagacacacct

SEQ ID NO: 4540 - DNA, 22 bp, Artificial Sequence
  Synthetic oligonucleotide
  Full comp hsa-miR-4798-3p MIMAT0019975
acttcggtatacttcgtgagtt

SEQ ID NO: 4541 - DNA, 22 bp, Artificial Sequence
  Synthetic oligonucleotide
  Full comp hsa-miR-4789-5p MIMAT0019959
catacacatatcaggtgtatac

SEQ ID NO: 4542 - DNA, 23 bp, Artificial Sequence
  Synthetic oligonucleotide
  Full comp hsa-miR-4686 MIMAT0019773
aacaccagaaagcccagcagata

SEQ ID NO: 4543 - DNA, 22 bp, Artificial Sequence
  Synthetic oligonucleotide
  Full comp hsa-miR-133b MIMAT0000770
tagctggttgaaggggaccaaa

SEQ ID NO: 4544 - DNA, 22 bp, Artificial Sequence
  Synthetic oligonucleotide
  Full comp hsa-miR-548ah-3p MIMAT0020957
gcaaaagtaactgcagtttttg

SEQ ID NO: 4545 - DNA, 21 bp, Artificial Sequence
  Synthetic oligonucleotide
  Full comp hsa-miR-3663-5p MIMAT0018084
ccgagcaccacgcagaccagc

SEQ ID NO: 4546 - DNA, 21 bp, Artificial Sequence
  Synthetic oligonucleotide
  Full comp hsa-miR-410-5p MIMAT0026558
cgaactcatcacagacaacct

SEQ ID NO: 4547 - DNA, 25 bp, Artificial Sequence
  Synthetic oligonucleotide
  Full comp hsa-miR-4728-3p MIMAT0019850
ctggggcaggagggaggtcagcatg

SEQ ID NO: 4548 - DNA, 22 bp, Artificial Sequence
  Synthetic oligonucleotide
  Full comp hsa-miR-15b-5p MIMAT0000417
tgtaaaccatgatgtgctgcta

SEQ ID NO: 4549 - DNA, 22 bp, Artificial Sequence
  Synthetic oligonucleotide
  Full comp hsa-miR-548q MIMAT0011163
ccgccattacttttgcaccagc

SEQ ID NO: 4550 - DNA, 20 bp, Artificial Sequence
  Synthetic oligonucleotide
  Full comp hsa-miR-572 MIMAT0003237
tgggccaccgccgagcggac

SEQ ID NO: 4551 - DNA, 19 bp, Artificial Sequence
  Synthetic oligonucleotide
  Full comp hsa-miR-4659b-5p MIMAT0019733
ttcttcttagacatggcaa

SEQ ID NO: 4552 - DNA, 22 bp, Artificial Sequence
  Synthetic oligonucleotide
  Full comp hsa-miR-4664-3p MIMAT0019738
gacggggctcacagaccggaag

SEQ ID NO: 4553 - DNA, 17 bp, Artificial Sequence
  Synthetic oligonucleotide
  Full comp hsa-miR-4478 MIMAT0019006
ctcctcagctcagcctc

SEQ ID NO: 4554 - DNA, 20 bp, Artificial Sequence
  Synthetic oligonucleotide
  Full comp hsa-miR-4485-3p MIMAT0019019
ttagggtaccgcggccgtta

SEQ ID NO: 4555 - DNA, 21 bp, Artificial Sequence
  Synthetic oligonucleotide
  Full comp hsa-miR-3648 MIMAT0018068
ccctcggcgatccccgcggct

SEQ ID NO: 4556 - DNA, 19 bp, Artificial Sequence
  Synthetic oligonucleotide
  Full comp hsa-miR-4307 MIMAT0016860
ggaaacaggaaaaaacatt

SEQ ID NO: 4557 - DNA, 24 bp, Artificial Sequence
  Synthetic oligonucleotide
  Full comp hsa-miR-6081 MIMAT0023706
ggcgccttggccggcactgctcct

SEQ ID NO: 4558 - DNA, 20 bp, Artificial Sequence
  Synthetic oligonucleotide
  Full comp hsa-miR-937-5p MIMAT0022938
ccagccccaccctgactcac

SEQ ID NO: 4559 - DNA, 21 bp, Artificial Sequence
  Synthetic oligonucleotide
  Full comp hsa-miR-181d-3p MIMAT0026608
gtgacattcatcccccggtgg

SEQ ID NO: 4560 - DNA, 21 bp, Artificial Sequence
  Synthetic oligonucleotide
  Full comp hsa-miR-128-3p MIMAT0000424
aaagagaccggttcactgtga

SEQ ID NO: 4561 - DNA, 20 bp, Artificial Sequence
  Synthetic oligonucleotide
  Full comp hsa-miR-6829-5p MIMAT0027558
tgccccttctcagcagccca

SEQ ID NO: 4562 - DNA, 21 bp, Artificial Sequence
  Synthetic oligonucleotide
  Full comp hsa-miR-7856-5p MIMAT0030431
gatccctcagtgtccttaaaa

SEQ ID NO: 4563 - DNA, 23 bp, Artificial Sequence
  Synthetic oligonucleotide
  Full comp hsa-miR-4756-5p MIMAT0019899
agcagagagtgagcgcctccctg

SEQ ID NO: 4564 - DNA, 22 bp, Artificial Sequence
  Synthetic oligonucleotide
  Full comp hsa-miR-3175 MIMAT0015052
acgtcactgcgttctctccccg

SEQ ID NO: 4565 - DNA, 21 bp, Artificial Sequence
  Synthetic oligonucleotide
  Full comp hsa-miR-3158-5p MIMAT0019211
gaagggcttcctctctgcagg

SEQ ID NO: 4566 - DNA, 22 bp, Artificial Sequence
  Synthetic oligonucleotide
  Full comp hsa-miR-4632-3p MIMAT0019688
ctagagcagcgagagggcggca

SEQ ID NO: 4567 - DNA, 21 bp, Artificial Sequence
  Synthetic oligonucleotide
  Full comp hsa-miR-1237-3p MIMAT0005592
ctgggggacggagcagaagga

SEQ ID NO: 4568 - DNA, 25 bp, Artificial Sequence
  Synthetic oligonucleotide
  Full comp hsa-miR-4517 MIMAT0019054
ctcagctgtgagtttcatcatattt

SEQ ID NO: 4569 - DNA, 22 bp, Artificial Sequence
  Synthetic oligonucleotide
  Full comp hsa-miR-155-3p MIMAT0004658
tgttaatgctaatatgtaggag

SEQ ID NO: 4570 - DNA, 23 bp, Artificial Sequence
  Synthetic oligonucleotide
  Full comp hsa-miR-3128 MIMAT0014991
atgagagttttttacttgccaga

SEQ ID NO: 4571 - DNA, 18 bp, Artificial Sequence
  Synthetic oligonucleotide
  Full comp hsa-miR-1268a MIMAT0005922
cccccaccaccacgcccg

SEQ ID NO: 4572 - DNA, 22 bp, Artificial Sequence
  Synthetic oligonucleotide
  Full comp hsa-miR-4661-3p MIMAT0019730
tggactagctctgtggatcctg

SEQ ID NO: 4573 - DNA, 20 bp, Artificial Sequence
  Synthetic oligonucleotide
  Full comp hsa-miR-7152-3p MIMAT0028215
gcctcctgtccaggaccaga

SEQ ID NO: 4574 - DNA, 20 bp, Artificial Sequence
  Synthetic oligonucleotide
  Full comp hsa-miR-6828-3p MIMAT0027557
ctgggaacaagagagcagat

SEQ ID NO: 4575 - DNA, 20 bp, Artificial Sequence
  Synthetic oligonucleotide
  Full comp hsa-miR-8056 MIMAT0030983
atgcatccagacaatccacg

SEQ ID NO: 4576 - DNA, 18 bp, Artificial Sequence
  Synthetic oligonucleotide
  Full comp hsa-miR-4444 MIMAT0018962
cgcctcttccaactcgag

SEQ ID NO: 4577 - DNA, 22 bp, Artificial Sequence
  Synthetic oligonucleotide
  Full comp hsa-miR-6838-5p MIMAT0027578
aggagtcttgccactgctgctt

SEQ ID NO: 4578 - DNA, 22 bp, Artificial Sequence
  Synthetic oligonucleotide
  Full comp hsa-miR-6757-5p MIMAT0027414
tcatcctggcctcccatcccta

SEQ ID NO: 4579 - DNA, 22 bp, Artificial Sequence
  Synthetic oligonucleotide
  Full comp hsa-miR-501-5p MIMAT0002872
tctcacccagggacaaaggatt

SEQ ID NO: 4580 - DNA, 21 bp, Artificial Sequence
  Synthetic oligonucleotide
  Full comp hsa-miR-342-5p MIMAT0004694
tcaatcacagatagcacccct

SEQ ID NO: 4581 - DNA, 23 bp, Artificial Sequence
  Synthetic oligonucleotide
  Full comp hsa-miR-6758-5p MIMAT0027416
acatcacatccttcccctctcta

SEQ ID NO: 4582 - DNA, 23 bp, Artificial Sequence
  Synthetic oligonucleotide
  Full comp hsa-miR-1229-3p MIMAT0005584
ctgtgggagggcagtggtgagag

SEQ ID NO: 4583 - DNA, 22 bp, Artificial Sequence
  Synthetic oligonucleotide
  Full comp hsa-miR-642a-3p MIMAT0020924
ggttccctctccaaatgtgtct

SEQ ID NO: 4584 - DNA, 22 bp, Artificial Sequence
  Synthetic oligonucleotide
  Full comp hsa-miR-1284 MIMAT0005941
gaaaagccagggtctgtataga

SEQ ID NO: 4585 - DNA, 24 bp, Artificial Sequence
  Synthetic oligonucleotide
  Full comp hsa-miR-1229-5p MIMAT0022942
cgctctcccccaaaccctacccac

SEQ ID NO: 4586 - DNA, 23 bp, Artificial Sequence
  Synthetic oligonucleotide
  Full comp hsa-miR-3185 MIMAT0015065
ccgcagaccgaccgccttcttct

SEQ ID NO: 4587 - DNA, 20 bp, Artificial Sequence
  Synthetic oligonucleotide
  Full comp hsa-miR-4270 MIMAT0016900
gccctcccctgactccctga

SEQ ID NO: 4588 - DNA, 22 bp, Artificial Sequence
  Synthetic oligonucleotide
  Full comp hsa-miR-556-5p MIMAT0003220
ctcatattacaatgagctcatc

SEQ ID NO: 4589 - DNA, 22 bp, Artificial Sequence
  Synthetic oligonucleotide
  Full comp hsa-miR-4705 MIMAT0019805
acagcaattaccaagtgattga

SEQ ID NO: 4590 - DNA, 22 bp, Artificial Sequence
  Synthetic oligonucleotide
  Full comp hsa-miR-519a-5p MIMAT0005452
cagaaagcgcttccctctagag

SEQ ID NO: 4591 - DNA, 22 bp, Artificial Sequence
  Synthetic oligonucleotide
  Full comp hsa-miR-5094 MIMAT0021086
aggttcaaggcattcactgatt

SEQ ID NO: 4592 - DNA, 22 bp, Artificial Sequence
  Synthetic oligonucleotide
  Full comp hsa-miR-145-3p MIMAT0004601
agaacagtatttccaggaatcc

SEQ ID NO: 4593 - DNA, 22 bp, Artificial Sequence
  Synthetic oligonucleotide
  Full comp hsa-miR-759 MIMAT0010497
gtcaaaattgtttgcactctgc

SEQ ID NO: 4594 - DNA, 21 bp, Artificial Sequence
  Synthetic oligonucleotide
  Full comp hsa-miR-2116-5p MIMAT0011160
agacctcctatgctaagaacc

SEQ ID NO: 4595 - DNA, 23 bp, Artificial Sequence
  Synthetic oligonucleotide
  Full comp hsa-miR-4741 MIMAT0019871
agccgacccctccggacagcccg

SEQ ID NO: 4596 - DNA, 24 bp, Artificial Sequence
  Synthetic oligonucleotide
  Full comp hsa-miR-6789-5p MIMAT0027478
cccgcgcgcccgggacgcccctac

SEQ ID NO: 4597 - DNA, 21 bp, Artificial Sequence
  Synthetic oligonucleotide
  Full comp hsa-miR-548t-5p MIMAT0015009
caaaaaccacgatcacttttg

SEQ ID NO: 4598 - DNA, 22 bp, Artificial Sequence
  Synthetic oligonucleotide
  Full comp hsa-miR-29c-3p MIMAT0000681
taaccgatttcaaatggtgcta

SEQ ID NO: 4599 - DNA, 22 bp, Artificial Sequence
  Synthetic oligonucleotide
  Full comp hsa-miR-483-5p MIMAT0004761
ctcccttctttcctcccgtctt

SEQ ID NO: 4600 - DNA, 22 bp, Artificial Sequence
  Synthetic oligonucleotide
  Full comp hsa-let-7f-5p MIMAT0000067
aactatacaatctactacctca

SEQ ID NO: 4601 - DNA, 21 bp, Artificial Sequence
  Synthetic oligonucleotide
  Full comp hsa-miR-1539 MIMAT0007401
gggcatctgggacgcgcagga

SEQ ID NO: 4602 - DNA, 22 bp, Artificial Sequence
  Synthetic oligonucleotide
  Full comp hsa-miR-6842-5p MIMAT0027586
ccttggctagagaccaccccca

SEQ ID NO: 4603 - DNA, 23 bp, Artificial Sequence
  Synthetic oligonucleotide
  Full comp hsa-miR-4745-5p MIMAT0019878
cgccgtcccgggagccccactca

SEQ ID NO: 4604 - DNA, 22 bp, Artificial Sequence
  Synthetic oligonucleotide
  Full comp hsa-miR-7111-5p MIMAT0028119
atggcctgtccttcctccccca

SEQ ID NO: 4605 - DNA, 22 bp, Artificial Sequence
  Synthetic oligonucleotide
  Full comp hsa-miR-3675-3p MIMAT0018099
ttgggggagttccttagagatg

SEQ ID NO: 4606 - DNA, 22 bp, Artificial Sequence
  Synthetic oligonucleotide
  Full comp hsa-let-7d-5p MIMAT0000065
aactatgcaacctactacctct

SEQ ID NO: 4607 - DNA, 22 bp, Artificial Sequence
  Synthetic oligonucleotide
  Full comp hsa-miR-3607-5p MIMAT0017984
actgatttgcttcatcacatgc

SEQ ID NO: 4608 - DNA, 22 bp, Artificial Sequence
  Synthetic oligonucleotide
  Full comp hsa-miR-30e-5p MIMAT0000692
cttccagtcaaggatgtttaca

SEQ ID NO: 4609 - DNA, 21 bp, Artificial Sequence
  Synthetic oligonucleotide
  Full comp hsa-miR-555 MIMAT0003219
atcagaggttcagcttaccct

SEQ ID NO: 4610 - DNA, 22 bp, Artificial Sequence
  Synthetic oligonucleotide
  Full comp hsa-miR-1271-5p MIMAT0005796
tgagtgcttgctaggtgccaag

SEQ ID NO: 4611 - DNA, 23 bp, Artificial Sequence
  Synthetic oligonucleotide
  Full comp hsa-miR-18a-3p MIMAT0002891
ccagaaggagcacttagggcagt

SEQ ID NO: 4612 - DNA, 22 bp, Artificial Sequence
  Synthetic oligonucleotide
  Full comp hsa-miR-1255b-2-3p MIMAT0022725
tggatgagcaaagaaagtggtt

SEQ ID NO: 4613 - DNA, 19 bp, Artificial Sequence
  Synthetic oligonucleotide
  Full comp hsa-miR-378b MIMAT0014999
ttctgcctccaagtccagt

SEQ ID NO: 4614 - DNA, 23 bp, Artificial Sequence
  Synthetic oligonucleotide
  Full comp hsa-miR-7161-5p MIMAT0028232
accagttgcctctacagtcttta

SEQ ID NO: 4615 - DNA, 22 bp, Artificial Sequence
  Synthetic oligonucleotide
  Full comp hsa-miR-3915 MIMAT0018189
aataagaccatcttttcctcaa

SEQ ID NO: 4616 - DNA, 22 bp, Artificial Sequence
  Synthetic oligonucleotide
  Full comp hsa-miR-5007-3p MIMAT0021036
attagagtttggttcatatgat

SEQ ID NO: 4617 - DNA, 23 bp, Artificial Sequence
  Synthetic oligonucleotide
  Full comp hsa-miR-4462 MIMAT0018986
ttcccaagccaccctccgtgtca

SEQ ID NO: 4618 - DNA, 22 bp, Artificial Sequence
  Synthetic oligonucleotide
  Full comp hsa-miR-6820-3p MIMAT0027541
ctgtggcaggggagaagtcaca

SEQ ID NO: 4619 - DNA, 22 bp, Artificial Sequence
  Synthetic oligonucleotide
  Full comp hsa-miR-369-5p MIMAT0001621
gcgaatataacacggtcgatct

SEQ ID NO: 4620 - DNA, 22 bp, Artificial Sequence
  Synthetic oligonucleotide
  Full comp hsa-miR-4537 MIMAT0019080
cagctaagctcagctcggctca

SEQ ID NO: 4621 - DNA, 22 bp, Artificial Sequence
  Synthetic oligonucleotide
  Full comp hsa-miR-5704 MIMAT0022498
gcataatgggatgatggcctaa

SEQ ID NO: 4622 - DNA, 22 bp, Artificial Sequence
  Synthetic oligonucleotide
  Full comp hsa-miR-4450 MIMAT0018971
tcaccacttctccaaatcccca

SEQ ID NO: 4623 - DNA, 21 bp, Artificial Sequence
  Synthetic oligonucleotide
  Full comp hsa-miR-4321 MIMAT0016874
cgcagggcggtccaccgctaa

SEQ ID NO: 4624 - DNA, 22 bp, Artificial Sequence
  Synthetic oligonucleotide
  Full comp hsa-miR-4799-3p MIMAT0019977
tatataaatgcagcatgccagt

SEQ ID NO: 4625 - DNA, 23 bp, Artificial Sequence
  Synthetic oligonucleotide
  Full comp hsa-miR-4745-3p MIMAT0019879
gaccgtgagacgtcgccgggcca

SEQ ID NO: 4626 - DNA, 21 bp, Artificial Sequence
  Synthetic oligonucleotide
  Full comp hsa-miR-4725-5p MIMAT0019843
ggtgggaaggctgcagggtct

SEQ ID NO: 4627 - DNA, 22 bp, Artificial Sequence
  Synthetic oligonucleotide
  Full comp hsa-miR-6862-5p MIMAT0027625
aaagtctctcccagcatgcccg

SEQ ID NO: 4628 - DNA, 22 bp, Artificial Sequence
  Synthetic oligonucleotide
  Full comp hsa-miR-654-5p MIMAT0003330
gcacatgttctgcggcccacca

SEQ ID NO: 4629 - DNA, 22 bp, Artificial Sequence
  Synthetic oligonucleotide
  Full comp hsa-miR-99a-3p MIMAT0004511
cagacccatagaagcgagcttg

SEQ ID NO: 4630 - DNA, 19 bp, Artificial Sequence
  Synthetic oligonucleotide
  Full comp hsa-miR-626 MIMAT0003295
aagacattttcagacagct

SEQ ID NO: 4631 - DNA, 21 bp, Artificial Sequence
  Synthetic oligonucleotide
  Full comp hsa-miR-130b-5p MIMAT0004680
gtagtgcaacagggaaagagt

SEQ ID NO: 4632 - DNA, 22 bp, Artificial Sequence
  Synthetic oligonucleotide
  Full comp hsa-miR-487a-5p MIMAT0026559
cgaacacagcagggataaccac

SEQ ID NO: 4633 - DNA, 23 bp, Artificial Sequence
  Synthetic oligonucleotide
  Full comp hsa-miR-6799-3p MIMAT0027499
ctgtggggacaccatgcagggca

SEQ ID NO: 4634 - DNA, 23 bp, Artificial Sequence
  Synthetic oligonucleotide
  Full comp hsa-miR-3064-3p MIMAT0019865
tgtaaggtgttgcagtgtggcaa

SEQ ID NO: 4635 - DNA, 20 bp, Artificial Sequence
  Synthetic oligonucleotide
  Full comp hsa-miR-6726-3p MIMAT0027354
ctagcgggagacagggcgag

SEQ ID NO: 4636 - DNA, 21 bp, Artificial Sequence
  Synthetic oligonucleotide
  Full comp hsa-miR-548au-3p MIMAT0022292
ctggtgcaaaagtaactgcca

SEQ ID NO: 4637 - DNA, 24 bp, Artificial Sequence
  Synthetic oligonucleotide
  Full comp hsa-miR-939-5p MIMAT0004982
cacccccagagcctcagctcccca

SEQ ID NO: 4638 - DNA, 22 bp, Artificial Sequence
  Synthetic oligonucleotide
  Full comp hsa-miR-485-5p MIMAT0002175
gaattcatcacggccagcctct

SEQ ID NO: 4639 - DNA, 17 bp, Artificial Sequence
  Synthetic oligonucleotide
  Full comp hsa-miR-4251 MIMAT0016883
ttggcccttttctcagg

SEQ ID NO: 4640 - DNA, 21 bp, Artificial Sequence
  Synthetic oligonucleotide
  Full comp hsa-miR-7158-3p MIMAT0028227
tgggcccaatctctagttcag

SEQ ID NO: 4641 - DNA, 20 bp, Artificial Sequence
  Synthetic oligonucleotide
  Full comp hsa-miR-4506 MIMAT0019042
ttgcctcagaccacccattt

SEQ ID NO: 4642 - DNA, 21 bp, Artificial Sequence
  Synthetic oligonucleotide
  Full comp hsa-miR-6880-3p MIMAT0027661
ctgggggaggagagaaggcgg

SEQ ID NO: 4643 - DNA, 22 bp, Artificial Sequence
  Synthetic oligonucleotide
  Full comp hsa-miR-144-5p MIMAT0004600
cttacagtatatgatgatatcc

SEQ ID NO: 4644 - DNA, 22 bp, Artificial Sequence
  Synthetic oligonucleotide
  Full comp hsa-miR-122-5p MIMAT0000421
caaacaccattgtcacactcca

SEQ ID NO: 4645 - DNA, 22 bp, Artificial Sequence
  Synthetic oligonucleotide
  Full comp hsa-miR-206 MIMAT0000462
ccacacacttccttacattcca

SEQ ID NO: 4646 - DNA, 22 bp, Artificial Sequence
  Synthetic oligonucleotide
  Full comp hsa-miR-548f-5p MIMAT0026739
aaaaactgtgattacttttgca

SEQ ID NO: 4647 - DNA, 23 bp, Artificial Sequence
  Synthetic oligonucleotide
  Full comp hsa-miR-136-5p MIMAT0000448
tccatcatcaaaacaaatggagt

SEQ ID NO: 4648 - DNA, 22 bp, Artificial Sequence
  Synthetic oligonucleotide
  Full comp hsa-miR-4715-5p MIMAT0019824
ccaccttaactgcagccaactt

SEQ ID NO: 4649 - DNA, 23 bp, Artificial Sequence
  Synthetic oligonucleotide
  Full comp hsa-miR-6810-3p MIMAT0027521
ctggggaacaagggagcagggga

SEQ ID NO: 4650 - DNA, 20 bp, Artificial Sequence
  Synthetic oligonucleotide
  Full comp hsa-miR-8072 MIMAT0030999
ctgcctacctccccgccgcc

SEQ ID NO: 4651 - DNA, 18 bp, Artificial Sequence
  Synthetic oligonucleotide
  Full comp hsa-miR-4295 MIMAT0016844
aaggaaaacattgcactg

SEQ ID NO: 4652 - DNA, 21 bp, Artificial Sequence
  Synthetic oligonucleotide
  Full comp hsa-miR-5195-3p MIMAT0021127
agccccctcagagaactggat

SEQ ID NO: 4653 - DNA, 22 bp, Artificial Sequence
  Synthetic oligonucleotide
  Full comp hsa-miR-3689f MIMAT0019010
tcccaggaagcacgatatcaca

SEQ ID NO: 4654 - DNA, 22 bp, Artificial Sequence
  Synthetic oligonucleotide
  Full comp hsa-miR-1972 MIMAT0009447
tgagccactgtgcctggcctga

SEQ ID NO: 4655 - DNA, 22 bp, Artificial Sequence
  Synthetic oligonucleotide
  Full comp hsa-miR-340-5p MIMAT0004692
aatcagtctcattgctttataa

SEQ ID NO: 4656 - DNA, 21 bp, Artificial Sequence
  Synthetic oligonucleotide
  Full comp hsa-miR-3120-5p MIMAT0019198
tgtacagcaggcacagacagg

SEQ ID NO: 4657 - DNA, 22 bp, Artificial Sequence
  Synthetic oligonucleotide
  Full comp hsa-miR-485-3p MIMAT0002176
agagaggagagccgtgtatgac

SEQ ID NO: 4658 - DNA, 19 bp, Artificial Sequence
  Synthetic oligonucleotide
  Full comp hsa-miR-632 MIMAT0003302
tcccacaggaagcagacac

SEQ ID NO: 4659 - DNA, 22 bp, Artificial Sequence
  Synthetic oligonucleotide
  Full comp hsa-miR-25-3p MIMAT0000081
tcagaccgagacaagtgcaatg

SEQ ID NO: 4660 - DNA, 22 bp, Artificial Sequence
  Synthetic oligonucleotide
  Full comp hsa-miR-4684-3p MIMAT0019770
acgtctccaccgacttgcaaca

SEQ ID NO: 4661 - DNA, 23 bp, Artificial Sequence
  Synthetic oligonucleotide
  Full comp hsa-miR-6728-5p MIMAT0027357
cccctctggtcctaccatcccaa

SEQ ID NO: 4662 - DNA, 19 bp, Artificial Sequence
  Synthetic oligonucleotide
  Full comp hsa-miR-4289 MIMAT0016920
tgatagccctgcacaatgc

SEQ ID NO: 4663 - DNA, 22 bp, Artificial Sequence
  Synthetic oligonucleotide
  Full comp hsa-miR-3688-3p MIMAT0018116
agagtggcaaagtctttccata

SEQ ID NO: 4664 - DNA, 23 bp, Artificial Sequence
  Synthetic oligonucleotide
  Full comp hsa-miR-6851-5p MIMAT0027602
gctggcccctagtaccacctcct

SEQ ID NO: 4665 - DNA, 21 bp, Artificial Sequence
  Synthetic oligonucleotide
  Full comp hsa-miR-455-3p MIMAT0004784
gtgtatatgcccatggactgc

SEQ ID NO: 4666 - DNA, 23 bp, Artificial Sequence
  Synthetic oligonucleotide
  Full comp hsa-miR-425-5p MIMAT0003393
tcaacgggagtgatcgtgtcatt

SEQ ID NO: 4667 - DNA, 22 bp, Artificial Sequence
  Synthetic oligonucleotide
  Full comp hsa-miR-181c-5p MIMAT0000258
actcaccgacaggttgaatgtt

SEQ ID NO: 4668 - DNA, 22 bp, Artificial Sequence
  Synthetic oligonucleotide
  Full comp hsa-miR-6717-5p MIMAT0025846
tctctacatccccacatcgcct

SEQ ID NO: 4669 - DNA, 22 bp, Artificial Sequence
  Synthetic oligonucleotide
  Full comp hsa-miR-5685 MIMAT0022475
cccgtgataactgctgggctgt

SEQ ID NO: 4670 - DNA, 21 bp, Artificial Sequence
  Synthetic oligonucleotide
  Full comp hsa-miR-3668 MIMAT0018091
attttgatcaatctctacatt

SEQ ID NO: 4671 - DNA, 22 bp, Artificial Sequence
  Synthetic oligonucleotide
  Full comp hsa-miR-338-3p MIMAT0000763
caacaaaatcactgatgctgga

SEQ ID NO: 4672 - DNA, 21 bp, Artificial Sequence
  Synthetic oligonucleotide
  Full comp hsa-miR-499b-5p MIMAT0019897
tgaacatcacagcaagtctgt

SEQ ID NO: 4673 - DNA, 22 bp, Artificial Sequence
  Synthetic oligonucleotide
  Full comp hsa-miR-211-5p MIMAT0000268
aggcgaaggatgacaaagggaa

SEQ ID NO: 4674 - DNA, 22 bp, Artificial Sequence
  Synthetic oligonucleotide
  Full comp hsa-miR-153-5p MIMAT0026480
agctgcaacatcacaaaaatga

SEQ ID NO: 4675 - DNA, 22 bp, Artificial Sequence
  Synthetic oligonucleotide
  Full comp hsa-miR-4703-3p MIMAT0019802
gtggcaatacaatacaactaca

SEQ ID NO: 4676 - DNA, 23 bp, Artificial Sequence
  Synthetic oligonucleotide
  Full comp hsa-miR-767-5p MIMAT0003882
catgctcagacaaccatggtgca

SEQ ID NO: 4677 - DNA, 21 bp, Artificial Sequence
  Synthetic oligonucleotide
  Full comp hsa-miR-219a-5p MIMAT0000276
agaattgcgtttggacaatca

SEQ ID NO: 4678 - DNA, 22 bp, Artificial Sequence
  Synthetic oligonucleotide
  Full comp hsa-miR-219a-1-3p MIMAT0004567
cgggacgtccagactcaactct

SEQ ID NO: 4679 - DNA, 22 bp, Artificial Sequence
  Synthetic oligonucleotide
  Full comp hsa-miR-4436b-5p MIMAT0019940
ggcagggcaggcagaagtggac

SEQ ID NO: 4680 - DNA, 22 bp, Artificial Sequence
  Synthetic oligonucleotide
  Full comp hsa-miR-3121-5p MIMAT0019199
cttaaatagaataggcaaagga

SEQ ID NO: 4681 - DNA, 21 bp, Artificial Sequence
  Synthetic oligonucleotide
  Full comp hsa-miR-5572 MIMAT0022260
agcagacccctgcaccccaac

SEQ ID NO: 4682 - DNA, 21 bp, Artificial Sequence
  Synthetic oligonucleotide
  Full comp hsa-miR-4523 MIMAT0019061
acagccgaggccctctcggtc

SEQ ID NO: 4683 - DNA, 21 bp, Artificial Sequence
  Synthetic oligonucleotide
  Full comp hsa-miR-140-3p MIMAT0004597
ccgtggttctaccctgtggta

SEQ ID NO: 4684 - DNA, 21 bp, Artificial Sequence
  Synthetic oligonucleotide
  Full comp hsa-miR-3659 MIMAT0018080
tgccctcgtagacaacactca

SEQ ID NO: 4685 - DNA, 22 bp, Artificial Sequence
  Synthetic oligonucleotide
  Full comp hsa-miR-3679-3p MIMAT0018105
gatgaagattactggggggaag

SEQ ID NO: 4686 - DNA, 22 bp, Artificial Sequence
  Synthetic oligonucleotide
  Full comp hsa-miR-4526 MIMAT0019065
agcggccagccctgctgtcagc

SEQ ID NO: 4687 - DNA, 21 bp, Artificial Sequence
  Synthetic oligonucleotide
  Full comp hsa-miR-7850-5p MIMAT0030425
ccagccacactatgtccaaac

SEQ ID NO: 4688 - DNA, 19 bp, Artificial Sequence
  Synthetic oligonucleotide
  Full comp hsa-miR-6134 MIMAT0024618
tctacatcctaccacctca

SEQ ID NO: 4689 - DNA, 21 bp, Artificial Sequence
  Synthetic oligonucleotide
  Full comp hsa-miR-625-5p MIMAT0003294
ggactatagaactttccccct

SEQ ID NO: 4690 - DNA, 21 bp, Artificial Sequence
  Synthetic oligonucleotide
  Full comp hsa-miR-369-3p MIMAT0000721
aaagatcaaccatgtattatt

SEQ ID NO: 4691 - DNA, 22 bp, Artificial Sequence
  Synthetic oligonucleotide
  Full comp hsa-miR-1287-3p MIMAT0026738
atcactgcatctgtggctagag

SEQ ID NO: 4692 - DNA, 22 bp, Artificial Sequence
  Synthetic oligonucleotide
  Full comp hsa-miR-132-3p MIMAT0000426
cgaccatggctgtagactgtta

SEQ ID NO: 4693 - DNA, 22 bp, Artificial Sequence
  Synthetic oligonucleotide
  Full comp hsa-miR-6882-5p MIMAT0027664
ctgcttcagctcctgacttgta

SEQ ID NO: 4694 - DNA, 22 bp, Artificial Sequence
  Synthetic oligonucleotide
  Full comp hsa-miR-1537-5p MIMAT0026765
agaaaactgactaattacagct

SEQ ID NO: 4695 - DNA, 21 bp, Artificial Sequence
  Synthetic oligonucleotide
  Full comp hsa-miR-5002-3p MIMAT0021024
aagtggtcagtgaggcagtca

SEQ ID NO: 4696 - DNA, 23 bp, Artificial Sequence
  Synthetic oligonucleotide
  Full comp hsa-miR-639 MIMAT0003309
acagcgctcgcaaccgcagcgat

SEQ ID NO: 4697 - DNA, 23 bp, Artificial Sequence
  Synthetic oligonucleotide
  Full comp hsa-miR-6756-5p MIMAT0027412
agccccacctccagccccaccct

SEQ ID NO: 4698 - DNA, 21 bp, Artificial Sequence
  Synthetic oligonucleotide
  Full comp hsa-miR-1908-3p MIMAT0026916
cggggcggagccggcggccgg

SEQ ID NO: 4699 - DNA, 21 bp, Artificial Sequence
  Synthetic oligonucleotide
  Full comp hsa-miR-6811-3p MIMAT0027523
ctgcagggacaagcacaggct

SEQ ID NO: 4700 - DNA, 21 bp, Artificial Sequence
  Synthetic oligonucleotide
  Full comp hsa-miR-6514-3p MIMAT0025485
ctggagtggaagaacaggcag

SEQ ID NO: 4701 - DNA, 24 bp, Artificial Sequence
  Synthetic oligonucleotide
  Full comp hsa-miR-6738-3p MIMAT0027378
ctgggagtagaatgcaggcagaag

SEQ ID NO: 4702 - DNA, 22 bp, Artificial Sequence
  Synthetic oligonucleotide
  Full comp hsa-miR-548h-5p MIMAT0005928
gacaaaaaccgcgattactttt

SEQ ID NO: 4703 - DNA, 21 bp, Artificial Sequence
  Synthetic oligonucleotide
  Full comp hsa-miR-595 MIMAT0003263
agacacaccacggcacacttc

SEQ ID NO: 4704 - DNA, 21 bp, Artificial Sequence
  Synthetic oligonucleotide
  Full comp hsa-miR-662 MIMAT0003325
ctgctgggccacaacgtggga

SEQ ID NO: 4705 - DNA, 22 bp, Artificial Sequence
  Synthetic oligonucleotide
  Full comp hsa-miR-130a-3p MIMAT0000425
atgcccttttaacattgcactg

SEQ ID NO: 4706 - DNA, 19 bp, Artificial Sequence
  Synthetic oligonucleotide
  Full comp hsa-miR-4736 MIMAT0019862
cagcccagataacctgcct

SEQ ID NO: 4707 - DNA, 21 bp, Artificial Sequence
  Synthetic oligonucleotide
  Full comp hsa-miR-5088-3p MIMAT0027041
tgagggcccaggaagaaggga

SEQ ID NO: 4708 - DNA, 22 bp, Artificial Sequence
  Synthetic oligonucleotide
  Full comp hsa-miR-5004-5p MIMAT0021027
tcgtgaatttgccctgtcctca

SEQ ID NO: 4709 - DNA, 23 bp, Artificial Sequence
  Synthetic oligonucleotide
  Full comp hsa-miR-142-3p MIMAT0000434
tccataaagtaggaaacactaca

SEQ ID NO: 4710 - DNA, 21 bp, Artificial Sequence
  Synthetic oligonucleotide
  Full comp hsa-miR-4474-5p MIMAT0019234
tgtgtctgatcatgagactaa

SEQ ID NO: 4711 - DNA, 20 bp, Artificial Sequence
  Synthetic oligonucleotide
  Full comp hsa-miR-520d-5p MIMAT0002855
gaaagggcttccctttgtag

SEQ ID NO: 4712 - DNA, 20 bp, Artificial Sequence
  Synthetic oligonucleotide
  Full comp hsa-miR-1205 MIMAT0005869
ctcaaagcaaaccctgcaga

SEQ ID NO: 4713 - DNA, 22 bp, Artificial Sequence
  Synthetic oligonucleotide
  Full comp hsa-miR-1537-3p MIMAT0007399
acaactgtaactagacggtttt

SEQ ID NO: 4714 - DNA, 22 bp, Artificial Sequence
  Synthetic oligonucleotide
  Full comp hsa-miR-5187-5p MIMAT0021117
tccacttcaatccctcatccca

SEQ ID NO: 4715 - DNA, 22 bp, Artificial Sequence
  Synthetic oligonucleotide
  Full comp hsa-miR-4428 MIMAT0018943
gctccatgttcccgtctccttg

SEQ ID NO: 4716 - DNA, 21 bp, Artificial Sequence
  Synthetic oligonucleotide
  Full comp hsa-miR-4646-3p MIMAT0019708
ctgggaagggagagggacaat

SEQ ID NO: 4717 - DNA, 22 bp, Artificial Sequence
  Synthetic oligonucleotide
  Full comp hsa-miR-3529-5p MIMAT0019828
aacaacaaatcccagtctacct

SEQ ID NO: 4718 - DNA, 21 bp, Artificial Sequence
  Synthetic oligonucleotide
  Full comp hsa-miR-6809-3p MIMAT0027519
ctgggaaggagagaagagaag

SEQ ID NO: 4719 - DNA, 22 bp, Artificial Sequence
  Synthetic oligonucleotide
  Full comp hsa-miR-1-5p MIMAT0031892
atgggcatataaagaagtatgt

SEQ ID NO: 4720 - DNA, 21 bp, Artificial Sequence
  Synthetic oligonucleotide
  Full comp hsa-miR-27a-3p MIMAT0000084
gcggaacttagccactgtgaa

SEQ ID NO: 4721 - DNA, 23 bp, Artificial Sequence
  Synthetic oligonucleotide
  Full comp hsa-miR-671-5p MIMAT0003880
ctccagcccctccagggcttcct

SEQ ID NO: 4722 - DNA, 21 bp, Artificial Sequence
  Synthetic oligonucleotide
  Full comp hsa-miR-1285-5p MIMAT0022719
cctgggcaacaaagtgagatc

SEQ ID NO: 4723 - DNA, 22 bp, Artificial Sequence
  Synthetic oligonucleotide
  Full comp hsa-miR-5007-5p MIMAT0021035
aaaccatatcagccagactcta

SEQ ID NO: 4724 - DNA, 21 bp, Artificial Sequence
  Synthetic oligonucleotide
  Full comp hsa-miR-3919 MIMAT0018193
actgagtcctttgttctctgc

SEQ ID NO: 4725 - DNA, 22 bp, Artificial Sequence
  Synthetic oligonucleotide
  Full comp hsa-miR-8059 MIMAT0030986
gccttttcatctacagttcccc

SEQ ID NO: 4726 - DNA, 22 bp, Artificial Sequence
  Synthetic oligonucleotide
  Full comp hsa-miR-539-5p MIMAT0003163
acacaccaaggataatttctcc

SEQ ID NO: 4727 - DNA, 22 bp, Artificial Sequence
  Synthetic oligonucleotide
  Full comp hsa-miR-3124-3p MIMAT0019200
acttcacgggagtgaggaaagt

SEQ ID NO: 4728 - DNA, 20 bp, Artificial Sequence
  Synthetic oligonucleotide
  Full comp hsa-miR-33b-5p MIMAT0003301
gcaatgcaacagcaatgcac

SEQ ID NO: 4729 - DNA, 20 bp, Artificial Sequence
  Synthetic oligonucleotide
  Full comp hsa-miR-7108-3p MIMAT0028114
ctgtggggagacgggcgggt

SEQ ID NO: 4730 - DNA, 26 bp, Artificial Sequence
  Synthetic oligonucleotide
  Full comp hsa-miR-3916 MIMAT0018190
ctgagaaccagccatttcttcctctt

SEQ ID NO: 4731 - DNA, 17 bp, Artificial Sequence
  Synthetic oligonucleotide
  Full comp hsa-miR-4275 MIMAT0016905
aaagaagtggtaattgg

SEQ ID NO: 4732 - DNA, 23 bp, Artificial Sequence
  Synthetic oligonucleotide
  Full comp hsa-miR-6744-3p MIMAT0027390
ctgcaggatgacaagagaggccc

SEQ ID NO: 4733 - DNA, 20 bp, Artificial Sequence
  Synthetic oligonucleotide
  Full comp hsa-miR-6756-3p MIMAT0027413
ctgggcagggaggaagggga

SEQ ID NO: 4734 - DNA, 22 bp, Artificial Sequence
  Synthetic oligonucleotide
  Full comp hsa-miR-3170 MIMAT0015045
actgtctgtctcagaaccccag

SEQ ID NO: 4735 - DNA, 19 bp, Artificial Sequence
  Synthetic oligonucleotide
  Full comp hsa-miR-3649 MIMAT0018069
cttagacactcaggtccct

SEQ ID NO: 4736 - DNA, 23 bp, Artificial Sequence
  Synthetic oligonucleotide
  Full comp hsa-miR-4754 MIMAT0019894
actccgctaacccaggtccgcat

SEQ ID NO: 4737 - DNA, 22 bp, Artificial Sequence
  Synthetic oligonucleotide
  Full comp hsa-miR-5586-3p MIMAT0022288
ctttaaccagcttgtcactctg

SEQ ID NO: 4738 - DNA, 20 bp, Artificial Sequence
  Synthetic oligonucleotide
  Full comp hsa-miR-490-5p MIMAT0004764
acccacctggagatccatgg

SEQ ID NO: 4739 - DNA, 23 bp, Artificial Sequence
  Synthetic oligonucleotide
  Full comp hsa-miR-34c-5p MIMAT0000686
gcaatcagctaactacactgcct

SEQ ID NO: 4740 - DNA, 22 bp, Artificial Sequence
  Synthetic oligonucleotide
  Full comp hsa-miR-522-3p MIMAT0002868
acactctaaagggaaccatttt

SEQ ID NO: 4741 - DNA, 22 bp, Artificial Sequence
  Synthetic oligonucleotide
  Full comp hsa-miR-3689b-5p MIMAT0018180
tcccaggaaccatgatatcaca

SEQ ID NO: 4742 - DNA, 17 bp, Artificial Sequence
  Synthetic oligonucleotide
  Full comp hsa-miR-4306 MIMAT0016858
tactgcctttctctcca

SEQ ID NO: 4743 - DNA, 22 bp, Artificial Sequence
  Synthetic oligonucleotide
  Full comp hsa-miR-4515 MIMAT0019052
gggctgccgggagtccagtcct

SEQ ID NO: 4744 - DNA, 24 bp, Artificial Sequence
  Synthetic oligonucleotide
  Full comp hsa-miR-1254 MIMAT0005905
actgcaggctccagcttccaggct

SEQ ID NO: 4745 - DNA, 23 bp, Artificial Sequence
  Synthetic oligonucleotide
  Full comp hsa-miR-373-3p MIMAT0000726
acaccccaaaatcgaagcacttc

SEQ ID NO: 4746 - DNA, 22 bp, Artificial Sequence
  Synthetic oligonucleotide
  Full comp hsa-miR-365b-5p MIMAT0022833
acagctgcccctgaaagtccct

SEQ ID NO: 4747 - DNA, 23 bp, Artificial Sequence
  Synthetic oligonucleotide
  Full comp hsa-miR-4802-3p MIMAT0019982
gcttgaaggtttccatccatgta

SEQ ID NO: 4748 - DNA, 21 bp, Artificial Sequence
  Synthetic oligonucleotide
  Full comp hsa-miR-548aj-3p MIMAT0018990
taaaagtaattgcagttttta

SEQ ID NO: 4749 - DNA, 24 bp, Artificial Sequence
  Synthetic oligonucleotide
  Full comp hsa-miR-6876-3p MIMAT0027653
ctgagaaggaaaacacagacagct

SEQ ID NO: 4750 - DNA, 22 bp, Artificial Sequence
  Synthetic oligonucleotide
  Full comp hsa-miR-185-5p MIMAT0000455
tcaggaactgcctttctctcca

SEQ ID NO: 4751 - DNA, 23 bp, Artificial Sequence
  Synthetic oligonucleotide
  Full comp hsa-miR-3127-5p MIMAT0014990
cttcccattccacaagccctgat

SEQ ID NO: 4752 - DNA, 21 bp, Artificial Sequence
  Synthetic oligonucleotide
  Full comp hsa-miR-6503-3p MIMAT0025463
ggaggtctgcatcctagtccc

SEQ ID NO: 4753 - DNA, 25 bp, Artificial Sequence
  Synthetic oligonucleotide
  Full comp hsa-miR-3180-5p MIMAT0015057
cgacgtggggcggagcgtctggaag

SEQ ID NO: 4754 - DNA, 22 bp, Artificial Sequence
  Synthetic oligonucleotide
  Full comp hsa-miR-5698 MIMAT0022491
ccacaatcactgcactccccca

SEQ ID NO: 4755 - DNA, 22 bp, Artificial Sequence
  Synthetic oligonucleotide
  Full comp hsa-miR-4477b MIMAT0019005
atcaatcacaaatgtccttaat

SEQ ID NO: 4756 - DNA, 21 bp, Artificial Sequence
  Synthetic oligonucleotide
  Full comp hsa-miR-888-5p MIMAT0004916
tgactgacagctttttgagta

SEQ ID NO: 4757 - DNA, 20 bp, Artificial Sequence
  Synthetic oligonucleotide
  Full comp hsa-miR-548ah-5p MIMAT0018972
caaacactgcaatcactttt

SEQ ID NO: 4758 - DNA, 22 bp, Artificial Sequence
  Synthetic oligonucleotide
  Full comp hsa-miR-7-2-3p MIMAT0004554
ttaggtagactgggatttgttg

SEQ ID NO: 4759 - DNA, 22 bp, Artificial Sequence
  Synthetic oligonucleotide
  Full comp hsa-miR-4520-2-3p MIMAT0020300
acctgcgtgttttctgtccaaa

SEQ ID NO: 4760 - DNA, 21 bp, Artificial Sequence
  Synthetic oligonucleotide
  Full comp hsa-miR-6077 MIMAT0023702
gaaggccgtacagctcttccc

SEQ ID NO: 4761 - DNA, 17 bp, Artificial Sequence
  Synthetic oligonucleotide
  Full comp hsa-miR-3123 MIMAT0014985
gattaaacaattctctg

SEQ ID NO: 4762 - DNA, 23 bp, Artificial Sequence
  Synthetic oligonucleotide
  Full comp hsa-miR-4693-5p MIMAT0019784
tgtgacagtgaaattcacagtat

SEQ ID NO: 4763 - DNA, 23 bp, Artificial Sequence
  Synthetic oligonucleotide
  Full comp hsa-miR-6807-3p MIMAT0027515
ctgggccaagcaggaatgcagtg

SEQ ID NO: 4764 - DNA, 17 bp, Artificial Sequence
  Synthetic oligonucleotide
  Full comp hsa-miR-4283 MIMAT0016914
aaactcgctgagcccca

SEQ ID NO: 4765 - DNA, 23 bp, Artificial Sequence
  Synthetic oligonucleotide
  Full comp hsa-miR-922 MIMAT0004972
gacgtagtcctattctctgctgc

SEQ ID NO: 4766 - DNA, 21 bp, Artificial Sequence
  Synthetic oligonucleotide
  Full comp hsa-miR-6890-5p MIMAT0027680
cctactctgccctaccccatg

SEQ ID NO: 4767 - DNA, 18 bp, Artificial Sequence
  Synthetic oligonucleotide
  Full comp hsa-miR-4284 MIMAT0016915
atggggtgatgtgagccc

SEQ ID NO: 4768 - DNA, 21 bp, Artificial Sequence
  Synthetic oligonucleotide
  Full comp hsa-miR-4789-3p MIMAT0019960
tatatacacctgctatgtgtg

SEQ ID NO: 4769 - DNA, 22 bp, Artificial Sequence
  Synthetic oligonucleotide
  Full comp hsa-miR-7702 MIMAT0030017
tcagggagtctggcagtctaag

SEQ ID NO: 4770 - DNA, 18 bp, Artificial Sequence
  Synthetic oligonucleotide
  Full comp hsa-miR-513a-5p MIMAT0002877
atgacacctccctgtgaa

SEQ ID NO: 4771 - DNA, 22 bp, Artificial Sequence
  Synthetic oligonucleotide
  Full comp hsa-miR-6787-5p MIMAT0027474
gcagccagctctacccccgcca

SEQ ID NO: 4772 - DNA, 22 bp, Artificial Sequence
  Synthetic oligonucleotide
  Full comp hsa-miR-3667-5p MIMAT0018089
accttctcctcaatgggtcttt

SEQ ID NO: 4773 - DNA, 22 bp, Artificial Sequence
  Synthetic oligonucleotide
  Full comp hsa-miR-450a-5p MIMAT0001545
atattaggaacacatcgcaaaa

SEQ ID NO: 4774 - DNA, 23 bp, Artificial Sequence
  Synthetic oligonucleotide
  Full comp hsa-miR-3118 MIMAT0014980
agaattttcataatgcagtcaca

SEQ ID NO: 4775 - DNA, 21 bp, Artificial Sequence
  Synthetic oligonucleotide
  Full comp hsa-miR-6076 MIMAT0023701
ccacctctcctctgtcatgct

SEQ ID NO: 4776 - DNA, 19 bp, Artificial Sequence
  Synthetic oligonucleotide
  Full comp hsa-miR-1290 MIMAT0005880
tccctgatccaaaaatcca

SEQ ID NO: 4777 - DNA, 22 bp, Artificial Sequence
  Synthetic oligonucleotide
  Full comp hsa-miR-3163 MIMAT0015037
gtcttactgccctcattttata

SEQ ID NO: 4778 - DNA, 23 bp, Artificial Sequence
  Synthetic oligonucleotide
  Full comp hsa-miR-7154-5p MIMAT0028218
ccaagctagacccagttcatgaa

SEQ ID NO: 4779 - DNA, 22 bp, Artificial Sequence
  Synthetic oligonucleotide
  Full comp hsa-miR-663a MIMAT0003326
gcggtcccgcggcgccccgcct

SEQ ID NO: 4780 - DNA, 22 bp, Artificial Sequence
  Synthetic oligonucleotide
  Full comp hsa-miR-6824-5p MIMAT0027548
tccctggcccaacctcccctac

SEQ ID NO: 4781 - DNA, 23 bp, Artificial Sequence
  Synthetic oligonucleotide
  Full comp hsa-miR-9-5p MIMAT0000441
tcatacagctagataaccaaaga

SEQ ID NO: 4782 - DNA, 19 bp, Artificial Sequence
  Synthetic oligonucleotide
  Full comp hsa-miR-548f-3p MIMAT0005895
aaaagtaattacagttttt

SEQ ID NO: 4783 - DNA, 25 bp, Artificial Sequence
  Synthetic oligonucleotide
  Full comp hsa-miR-378c MIMAT0016847
ccactcttctgactccaagtccagt

SEQ ID NO: 4784 - DNA, 22 bp, Artificial Sequence
  Synthetic oligonucleotide
  Full comp hsa-miR-216a-3p MIMAT0022844
ataatcccagagaccactgtga

SEQ ID NO: 4785 - DNA, 24 bp, Artificial Sequence
  Synthetic oligonucleotide
  Full comp hsa-miR-6831-5p MIMAT0027562
gacctcctcctcacactctaccta

SEQ ID NO: 4786 - DNA, 22 bp, Artificial Sequence
  Synthetic oligonucleotide
  Full comp hsa-miR-892c-3p MIMAT0025858
tccactcagaaaggaaacagtg

SEQ ID NO: 4787 - DNA, 24 bp, Artificial Sequence
  Synthetic oligonucleotide
  Full comp hsa-miR-125a-5p MIMAT0000443
tcacaggttaaagggtctcaggga

SEQ ID NO: 4788 - DNA, 19 bp, Artificial Sequence
  Synthetic oligonucleotide
  Full comp hsa-miR-378e MIMAT0018927
tcctgactccaagtccagt

SEQ ID NO: 4789 - DNA, 22 bp, Artificial Sequence
  Synthetic oligonucleotide
  Full comp hsa-miR-3617-5p MIMAT0017997
cccatcttgcaactatgtcttt

SEQ ID NO: 4790 - DNA, 24 bp, Artificial Sequence
  Synthetic oligonucleotide
  Full comp hsa-miR-3662 MIMAT0018083
catcagtcactactcatcattttc

SEQ ID NO: 4791 - DNA, 19 bp, Artificial Sequence
  Synthetic oligonucleotide
  Full comp hsa-miR-604 MIMAT0003272
gtcctgaattccgcagcct

SEQ ID NO: 4792 - DNA, 18 bp, Artificial Sequence
  Synthetic oligonucleotide
  Full comp hsa-miR-4278 MIMAT0016910
caagggcaaaccccctag

SEQ ID NO: 4793 - DNA, 22 bp, Artificial Sequence
  Synthetic oligonucleotide
  Full comp hsa-miR-3140-3p MIMAT0015008
actacctgaattcccaaaagct

SEQ ID NO: 4794 - DNA, 20 bp, Artificial Sequence
  Synthetic oligonucleotide
  Full comp hsa-miR-181b-2-3p MIMAT0031893
tgcattcattgatcagtgag

SEQ ID NO: 4795 - DNA, 21 bp, Artificial Sequence
  Synthetic oligonucleotide
  Full comp hsa-miR-4540 MIMAT0019083
taaacctacaggcaggactaa

SEQ ID NO: 4796 - DNA, 19 bp, Artificial Sequence
  Synthetic oligonucleotide
  Full comp hsa-miR-6130 MIMAT0024614
catacaatccactccctca

SEQ ID NO: 4797 - DNA, 22 bp, Artificial Sequence
  Synthetic oligonucleotide
  Full comp hsa-miR-3907 MIMAT0018179
tgtgagccagcctggagcacct

SEQ ID NO: 4798 - DNA, 22 bp, Artificial Sequence
  Synthetic oligonucleotide
  Full comp hsa-miR-493-3p MIMAT0003161
cctggcacacagtagaccttca

SEQ ID NO: 4799 - DNA, 17 bp, Artificial Sequence
  Synthetic oligonucleotide
  Full comp hsa-miR-4456 MIMAT0018978
aaaaggaagccaccagg

SEQ ID NO: 4800 - DNA, 22 bp, Artificial Sequence
  Synthetic oligonucleotide
  Full comp hsa-miR-5009-3p MIMAT0021042
ttttggactttcagatttagga

SEQ ID NO: 4801 - DNA, 22 bp, Artificial Sequence
  Synthetic oligonucleotide
  Full comp hsa-miR-99a-5p MIMAT0000097
cacaagatcggatctacgggtt

SEQ ID NO: 4802 - DNA, 22 bp, Artificial Sequence
  Synthetic oligonucleotide
  Full comp hsa-miR-196a-5p MIMAT0000226
cccaacaacatgaaactaccta

SEQ ID NO: 4803 - DNA, 23 bp, Artificial Sequence
  Synthetic oligonucleotide
  Full comp hsa-miR-4743-5p MIMAT0019874
atgcctcctgtcccatccggcca

SEQ ID NO: 4804 - DNA, 22 bp, Artificial Sequence
  Synthetic oligonucleotide
  Full comp hsa-miR-4723-3p MIMAT0019839
tttggggaggagccagagaggg

SEQ ID NO: 4805 - DNA, 19 bp, Artificial Sequence
  Synthetic oligonucleotide
  Full comp hsa-miR-6763-5p MIMAT0027426
ctccccagccactccccag

SEQ ID NO: 4806 - DNA, 22 bp, Artificial Sequence
  Synthetic oligonucleotide
  Full comp hsa-miR-6809-5p MIMAT0027518
tgatcctcttctttccttgcca

SEQ ID NO: 4807 - DNA, 21 bp, Artificial Sequence
  Synthetic oligonucleotide
  Full comp hsa-miR-890 MIMAT0004912
caactgatgcctttccaagta

SEQ ID NO: 4808 - DNA, 21 bp, Artificial Sequence
  Synthetic oligonucleotide
  Full comp hsa-miR-4667-3p MIMAT0019744
ctgtggggacagaaggaggga

SEQ ID NO: 4809 - DNA, 22 bp, Artificial Sequence
  Synthetic oligonucleotide
  Full comp hsa-miR-1247-5p MIMAT0005899
tccggggacgaacgggacgggt

SEQ ID NO: 4810 - DNA, 22 bp, Artificial Sequence
  Synthetic oligonucleotide
  Full comp hsa-miR-6512-5p MIMAT0025480
tcttccagctcttctaatggta

SEQ ID NO: 4811 - DNA, 24 bp, Artificial Sequence
  Synthetic oligonucleotide
  Full comp hsa-miR-3613-3p MIMAT0017991
gaagggttgggcttttttttttgt

SEQ ID NO: 4812 - DNA, 22 bp, Artificial Sequence
  Synthetic oligonucleotide
  Full comp hsa-miR-548a-5p MIMAT0004803
ggtaaaactcgcaattactttt

SEQ ID NO: 4813 - DNA, 21 bp, Artificial Sequence
  Synthetic oligonucleotide
  Full comp hsa-miR-1180-5p MIMAT0026735
tattcccggccgggtgggtcc

SEQ ID NO: 4814 - DNA, 22 bp, Artificial Sequence
  Synthetic oligonucleotide
  Full comp hsa-miR-526b-3p MIMAT0002836
gcctctaaaaggaagcactttc

SEQ ID NO: 4815 - DNA, 22 bp, Artificial Sequence
  Synthetic oligonucleotide
  Full comp hsa-miR-4669 MIMAT0019749
cctcctccacttcccggacaca

SEQ ID NO: 4816 - DNA, 21 bp, Artificial Sequence
  Synthetic oligonucleotide
  Full comp hsa-miR-497-5p MIMAT0002820
acaaaccacagtgtgctgctg

SEQ ID NO: 4817 - DNA, 17 bp, Artificial Sequence
  Synthetic oligonucleotide
  Full comp hsa-miR-4426 MIMAT0018941
aaagtacgtccatcttc

SEQ ID NO: 4818 - DNA, 24 bp, Artificial Sequence
  Synthetic oligonucleotide
  Full comp hsa-miR-3976 MIMAT0019361
acattaatcttcctgctctctata

SEQ ID NO: 4819 - DNA, 18 bp, Artificial Sequence
  Synthetic oligonucleotide
  Full comp hsa-miR-3196 MIMAT0015080
gaggcccctgccgccccg

SEQ ID NO: 4820 - DNA, 22 bp, Artificial Sequence
  Synthetic oligonucleotide
  Full comp hsa-miR-1273g-5p MIMAT0020602
acttactgcagcctcaaccacc

SEQ ID NO: 4821 - DNA, 24 bp, Artificial Sequence
  Synthetic oligonucleotide
  Full comp hsa-miR-6840-5p MIMAT0027582
atctgcaggtctttgcccgggggt

SEQ ID NO: 4822 - DNA, 23 bp, Artificial Sequence
  Synthetic oligonucleotide
  Full comp hsa-miR-6889-5p MIMAT0027678
attccggaccccagactccccga

SEQ ID NO: 4823 - DNA, 22 bp, Artificial Sequence
  Synthetic oligonucleotide
  Full comp hsa-miR-642b-3p MIMAT0018444
gggtccctctccaaatgtgtct

SEQ ID NO: 4824 - DNA, 22 bp, Artificial Sequence
  Synthetic oligonucleotide
  Full comp hsa-miR-363-3p MIMAT0000707
tacagatggataccgtgcaatt

SEQ ID NO: 4825 - DNA, 22 bp, Artificial Sequence
  Synthetic oligonucleotide
  Full comp hsa-miR-3620-3p MIMAT0018001
ctgggtgcgggatgcagggtga

SEQ ID NO: 4826 - DNA, 19 bp, Artificial Sequence
  Synthetic oligonucleotide
  Full comp hsa-miR-4265 MIMAT0016891
cccagagctgagcccacag

SEQ ID NO: 4827 - DNA, 22 bp, Artificial Sequence
  Synthetic oligonucleotide
  Full comp hsa-miR-6869-5p MIMAT0027638
gccgccgcgcgccactactcac

SEQ ID NO: 4828 - DNA, 22 bp, Artificial Sequence
  Synthetic oligonucleotide
  Full comp hsa-miR-3154 MIMAT0015028
tctgctcccaactccccttctg

SEQ ID NO: 4829 - DNA, 26 bp, Artificial Sequence
  Synthetic oligonucleotide
  Full comp hsa-miR-4685-5p MIMAT0019771
aaccttgccccactccaagccctggg

SEQ ID NO: 4830 - DNA, 22 bp, Artificial Sequence
  Synthetic oligonucleotide
  Full comp hsa-miR-6853-3p MIMAT0027607
ctgcgcagggttccaatgaaca

SEQ ID NO: 4831 - DNA, 22 bp, Artificial Sequence
  Synthetic oligonucleotide
  Full comp hsa-miR-4520-3p MIMAT0019057
ttcctgcgtgttttctgtccaa

SEQ ID NO: 4832 - DNA, 24 bp, Artificial Sequence
  Synthetic oligonucleotide
  Full comp hsa-miR-3978 MIMAT0019363
acaccctggatgcatgctttccac

SEQ ID NO: 4833 - DNA, 22 bp, Artificial Sequence
  Synthetic oligonucleotide
  Full comp hsa-miR-493-5p MIMAT0002813
aatgaaagcctaccatgtacaa

SEQ ID NO: 4834 - DNA, 24 bp, Artificial Sequence
  Synthetic oligonucleotide
  Full comp hsa-miR-5683 MIMAT0022472
gaagtcagagaatctgcatctgta

SEQ ID NO: 4835 - DNA, 21 bp, Artificial Sequence
  Synthetic oligonucleotide
  Full comp hsa-miR-629-5p MIMAT0004810
agttctcccaacgtaaaccca

SEQ ID NO: 4836 - DNA, 22 bp, Artificial Sequence
  Synthetic oligonucleotide
  Full comp hsa-miR-4675 MIMAT0019757
cctgctggtcaatcacagcccc

SEQ ID NO: 4837 - DNA, 23 bp, Artificial Sequence
  Synthetic oligonucleotide
  Full comp hsa-miR-6776-3p MIMAT0027453
ctggggagagacagtggtggttg

SEQ ID NO: 4838 - DNA, 22 bp, Artificial Sequence
  Synthetic oligonucleotide
  Full comp hsa-miR-4423-5p MIMAT0019232
gcatgggaacaaaaaggcaact

SEQ ID NO: 4839 - DNA, 24 bp, Artificial Sequence
  Synthetic oligonucleotide
  Full comp hsa-miR-5009-5p MIMAT0021041
atccccaaatctgaaaaagtccaa

SEQ ID NO: 4840 - DNA, 21 bp, Artificial Sequence
  Synthetic oligonucleotide
  Full comp hsa-miR-6780b-3p MIMAT0027573
ctagggaaaggagacaaggga

SEQ ID NO: 4841 - DNA, 22 bp, Artificial Sequence
  Synthetic oligonucleotide
  Full comp hsa-miR-655-3p MIMAT0003331
aaagaggttaaccatgtattat

SEQ ID NO: 4842 - DNA, 23 bp, Artificial Sequence
  Synthetic oligonucleotide
  Full comp hsa-miR-181d-5p MIMAT0002821
acccaccgacaacaatgaatgtt

SEQ ID NO: 4843 - DNA, 17 bp, Artificial Sequence
  Synthetic oligonucleotide
  Full comp hsa-miR-4443 MIMAT0018961
aaaacccacgcctccaa

SEQ ID NO: 4844 - DNA, 22 bp, Artificial Sequence
  Synthetic oligonucleotide
  Full comp hsa-miR-4528 MIMAT0019067
gtccagatcatacatataatga

SEQ ID NO: 4845 - DNA, 21 bp, Artificial Sequence
  Synthetic oligonucleotide
  Full comp hsa-miR-2116-3p MIMAT0011161
gggagttcttggcatgggagg

SEQ ID NO: 4846 - DNA, 21 bp, Artificial Sequence
  Synthetic oligonucleotide
  Full comp hsa-miR-6895-5p MIMAT0027690
cttactctgtgcctggccctg

SEQ ID NO: 4847 - DNA, 22 bp, Artificial Sequence
  Synthetic oligonucleotide
  Full comp hsa-miR-22-5p MIMAT0004495
taaagcttgccactgaagaact

SEQ ID NO: 4848 - DNA, 23 bp, Artificial Sequence
  Synthetic oligonucleotide
  Full comp hsa-miR-3190-3p MIMAT0022839
tctctggccgtctaccttccaca

SEQ ID NO: 4849 - DNA, 21 bp, Artificial Sequence
  Synthetic oligonucleotide
  Full comp hsa-miR-548m MIMAT0005917
caaaaaccacaaatacctttg

SEQ ID NO: 4850 - DNA, 22 bp, Artificial Sequence
  Synthetic oligonucleotide
  Full comp hsa-miR-18b-3p MIMAT0004751
gccagaaggggcatttagggca

SEQ ID NO: 4851 - DNA, 22 bp, Artificial Sequence
  Synthetic oligonucleotide
  Full comp hsa-miR-28-5p MIMAT0000085
ctcaatagactgtgagctcctt

SEQ ID NO: 4852 - DNA, 19 bp, Artificial Sequence
  Synthetic oligonucleotide
  Full comp hsa-miR-6070 MIMAT0023695
ctccagggactggaaccgg

SEQ ID NO: 4853 - DNA, 21 bp, Artificial Sequence
  Synthetic oligonucleotide
  Full comp hsa-miR-323a-3p MIMAT0000755
agaggtcgaccgtgtaatgtg

SEQ ID NO: 4854 - DNA, 22 bp, Artificial Sequence
  Synthetic oligonucleotide
  Full comp hsa-miR-8068 MIMAT0030995
acaacgatccttacaacaaaca

SEQ ID NO: 4855 - DNA, 22 bp, Artificial Sequence
  Synthetic oligonucleotide
  Full comp hsa-miR-3173-3p MIMAT0015048
tggcctgcctatttcctccttt

SEQ ID NO: 4856 - DNA, 22 bp, Artificial Sequence
  Synthetic oligonucleotide
  Full comp hsa-miR-6861-5p MIMAT0027623
cctggagccccacctacccagt

SEQ ID NO: 4857 - DNA, 23 bp, Artificial Sequence
  Synthetic oligonucleotide
  Full comp hsa-miR-6767-5p MIMAT0027434
tctccatgtgtccctgtctgcga

SEQ ID NO: 4858 - DNA, 21 bp, Artificial Sequence
  Synthetic oligonucleotide
  Full comp hsa-miR-8061 MIMAT0030988
aacaatatcctctaatctaag

SEQ ID NO: 4859 - DNA, 22 bp, Artificial Sequence
  Synthetic oligonucleotide
  Full comp hsa-miR-519c-3p MIMAT0002832
atcctctaaaaagatgcacttt

SEQ ID NO: 4860 - DNA, 21 bp, Artificial Sequence
  Synthetic oligonucleotide
  Full comp hsa-miR-6785-3p MIMAT0027471
ctggggaaggtggggcgatgt

SEQ ID NO: 4861 - DNA, 21 bp, Artificial Sequence
  Synthetic oligonucleotide
  Full comp hsa-miR-129-5p MIMAT0000242
gcaagcccagaccgcaaaaag

SEQ ID NO: 4862 - DNA, 22 bp, Artificial Sequence
  Synthetic oligonucleotide
  Full comp hsa-miR-1295b-3p MIMAT0022294
ttgcccagatccgtggcctatt

SEQ ID NO: 4863 - DNA, 22 bp, Artificial Sequence
  Synthetic oligonucleotide
  Full comp hsa-miR-4733-5p MIMAT0019857
caccgggtctagcattgggatt

SEQ ID NO: 4864 - DNA, 19 bp, Artificial Sequence
  Synthetic oligonucleotide
  Full comp hsa-miR-7159-3p MIMAT0028229
cttccaactaacatagaaa

SEQ ID NO: 4865 - DNA, 22 bp, Artificial Sequence
  Synthetic oligonucleotide
  Full comp hsa-miR-3136-3p MIMAT0019203
actaactgaataggttgggcca

SEQ ID NO: 4866 - DNA, 25 bp, Artificial Sequence
  Synthetic oligonucleotide
  Full comp hsa-miR-658 MIMAT0003336
accaacggacctacttccctccgcc

SEQ ID NO: 4867 - DNA, 24 bp, Artificial Sequence
  Synthetic oligonucleotide
  Full comp hsa-miR-182-5p MIMAT0000259
agtgtgagttctaccattgccaaa

SEQ ID NO: 4868 - DNA, 21 bp, Artificial Sequence
  Synthetic oligonucleotide
  Full comp hsa-miR-548ak MIMAT0019013
tcaaaaaccgcagttactttt

SEQ ID NO: 4869 - DNA, 21 bp, Artificial Sequence
  Synthetic oligonucleotide
  Full comp hsa-miR-5588-5p MIMAT0022295
aaaagtcccactaatgccagt

SEQ ID NO: 4870 - DNA, 25 bp, Artificial Sequence
  Synthetic oligonucleotide
  Full comp hsa-miR-3143 MIMAT0015012
cgaaagaagcgctttacaatgttat

SEQ ID NO: 4871 - DNA, 22 bp, Artificial Sequence
  Synthetic oligonucleotide
  Full comp hsa-miR-504-5p MIMAT0002875
gatagagtgcagaccagggtct

SEQ ID NO: 4872 - DNA, 22 bp, Artificial Sequence
  Synthetic oligonucleotide
  Full comp hsa-miR-411-3p MIMAT0004813
ggttagtggaccgtgttacata

SEQ ID NO: 4873 - DNA, 22 bp, Artificial Sequence
  Synthetic oligonucleotide
  Full comp hsa-miR-4439 MIMAT0018957
atgcctccaaggtatcagtcac

SEQ ID NO: 4874 - DNA, 22 bp, Artificial Sequence
  Synthetic oligonucleotide
  Full comp hsa-miR-7111-3p MIMAT0028120
ctgggaggagggaagagaggat

SEQ ID NO: 4875 - DNA, 23 bp, Artificial Sequence
  Synthetic oligonucleotide
  Full comp hsa-miR-6727-5p MIMAT0027355
cgctcccagccgcctgccccgag

SEQ ID NO: 4876 - DNA, 21 bp, Artificial Sequence
  Synthetic oligonucleotide
  Full comp hsa-miR-514a-3p MIMAT0002883
tctactcacagaagtgtcaat

SEQ ID NO: 4877 - DNA, 21 bp, Artificial Sequence
  Synthetic oligonucleotide
  Full comp hsa-miR-4672 MIMAT0019754
tgcctctgtccagctgtgtaa

SEQ ID NO: 4878 - DNA, 22 bp, Artificial Sequence
  Synthetic oligonucleotide
  Full comp hsa-miR-4714-3p MIMAT0019823
caactctgaccacctaggttgg

SEQ ID NO: 4879 - DNA, 22 bp, Artificial Sequence
  Synthetic oligonucleotide
  Full comp hsa-miR-4753-3p MIMAT0019891
acacaaggctaaagaaagagaa

SEQ ID NO: 4880 - DNA, 18 bp, Artificial Sequence
  Synthetic oligonucleotide
  Full comp hsa-miR-1825 MIMAT0006765
ggagaggagggcactgga

SEQ ID NO: 4881 - DNA, 22 bp, Artificial Sequence
  Synthetic oligonucleotide
  Full comp hsa-miR-3925-5p MIMAT0018200
aggctccactttcagttctctt

SEQ ID NO: 4882 - DNA, 22 bp, Artificial Sequence
  Synthetic oligonucleotide
  Full comp hsa-miR-132-5p MIMAT0004594
agtaacaatcgaaagccacggt

SEQ ID NO: 4883 - DNA, 21 bp, Artificial Sequence
  Synthetic oligonucleotide
  Full comp hsa-miR-6509-5p MIMAT0025474
gttccactgccactacctaat

SEQ ID NO: 4884 - DNA, 22 bp, Artificial Sequence
  Synthetic oligonucleotide
  Full comp hsa-miR-4699-5p MIMAT0019794
ggaacttactctgcaatcttct

SEQ ID NO: 4885 - DNA, 20 bp, Artificial Sequence
  Synthetic oligonucleotide
  Full comp hsa-miR-5787 MIMAT0023252
acctccccgcgccccagccc

SEQ ID NO: 4886 - DNA, 22 bp, Artificial Sequence
  Synthetic oligonucleotide
  Full comp hsa-miR-1909-3p MIMAT0007883
cggtgagcacccggcccctgcg

SEQ ID NO: 4887 - DNA, 23 bp, Artificial Sequence
  Synthetic oligonucleotide
  Full comp hsa-miR-30c-5p MIMAT0000244
gctgagagtgtaggatgtttaca

SEQ ID NO: 4888 - DNA, 22 bp, Artificial Sequence
  Synthetic oligonucleotide
  Full comp hsa-miR-455-5p MIMAT0003150
cgatgtagtccaaaggcacata

SEQ ID NO: 4889 - DNA, 21 bp, Artificial Sequence
  Synthetic oligonucleotide
  Full comp hsa-miR-4761-3p MIMAT0019909
ggacaaagtgcgcatgccctc

SEQ ID NO: 4890 - DNA, 22 bp, Artificial Sequence
  Synthetic oligonucleotide
  Full comp hsa-miR-4760-3p MIMAT0019907
ggtttagattgaacatgaattt

SEQ ID NO: 4891 - DNA, 22 bp, Artificial Sequence
  Synthetic oligonucleotide
  Full comp hsa-miR-5585-3p MIMAT0022286
acctgtagtcccagctattcag

SEQ ID NO: 4892 - DNA, 22 bp, Artificial Sequence
  Synthetic oligonucleotide
  Full comp hsa-miR-6893-3p MIMAT0027687
ctggcaggtgaaggcagcaggg

SEQ ID NO: 4893 - DNA, 20 bp, Artificial Sequence
  Synthetic oligonucleotide
  Full comp hsa-miR-6889-3p MIMAT0027679
ctgggaagtaggggcacaga

SEQ ID NO: 4894 - DNA, 20 bp, Artificial Sequence
  Synthetic oligonucleotide
  Full comp hsa-miR-1911-3p MIMAT0007886
ggagaccacaatgcctggtg

SEQ ID NO: 4895 - DNA, 22 bp, Artificial Sequence
  Synthetic oligonucleotide
  Full comp hsa-miR-195-3p MIMAT0004615
ggagcagcacagccaatattgg

SEQ ID NO: 4896 - DNA, 22 bp, Artificial Sequence
  Synthetic oligonucleotide
  Full comp hsa-miR-1303 MIMAT0005891
agagcaagaccccgtctctaaa

SEQ ID NO: 4897 - DNA, 23 bp, Artificial Sequence
  Synthetic oligonucleotide
  Full comp hsa-miR-5589-3p MIMAT0022298
tgggagctaggttgccatgtgca

SEQ ID NO: 4898 - DNA, 21 bp, Artificial Sequence
  Synthetic oligonucleotide
  Full comp hsa-miR-4649-3p MIMAT0019712
tggggagaggcaggcctcaga

SEQ ID NO: 4899 - DNA, 23 bp, Artificial Sequence
  Synthetic oligonucleotide
  Full comp hsa-miR-548aj-5p MIMAT0022739
caaaaactgcaattacttttgca

SEQ ID NO: 4900 - DNA, 22 bp, Artificial Sequence
  Synthetic oligonucleotide
  Full comp hsa-miR-4747-3p MIMAT0019883
ctgggaggaaagcccgggcctt

SEQ ID NO: 4901 - DNA, 28 bp, Artificial Sequence
  Synthetic oligonucleotide
  Full comp hsa-miR-7161-3p MIMAT0028233
cctggagactgccagagtcaaagatcta

SEQ ID NO: 4902 - DNA, 21 bp, Artificial Sequence
  Synthetic oligonucleotide
  Full comp hsa-miR-1295a MIMAT0005885
tcacccagatctgcggcctaa

SEQ ID NO: 4903 - DNA, 22 bp, Artificial Sequence
  Synthetic oligonucleotide
  Full comp hsa-miR-376b-5p MIMAT0022923
aaacatagaaggaatatccacg

SEQ ID NO: 4904 - DNA, 22 bp, Artificial Sequence
  Synthetic oligonucleotide
  Full comp hsa-miR-4637 MIMAT0019694
tcacttgaatctgcagttagta

SEQ ID NO: 4905 - DNA, 21 bp, Artificial Sequence
  Synthetic oligonucleotide
  Full comp hsa-miR-6800-5p MIMAT0027500
ccgcccctgactgtcacctac

SEQ ID NO: 4906 - DNA, 22 bp, Artificial Sequence
  Synthetic oligonucleotide
  Full comp hsa-miR-506-5p MIMAT0022701
ttaagtaacaccttcctgaata

SEQ ID NO: 4907 - DNA, 23 bp, Artificial Sequence
  Synthetic oligonucleotide
  Full comp hsa-miR-1182 MIMAT0005827
gtcacatccctcccaagaccctc

SEQ ID NO: 4908 - DNA, 22 bp, Artificial Sequence
  Synthetic oligonucleotide
  Full comp hsa-miR-653-3p MIMAT0026625
tattgaaacaaactccagtgaa

SEQ ID NO: 4909 - DNA, 22 bp, Artificial Sequence
  Synthetic oligonucleotide
  Full comp hsa-miR-6871-3p MIMAT0027643
ctgtgggagccacagggtgctg

SEQ ID NO: 4910 - DNA, 22 bp, Artificial Sequence
  Synthetic oligonucleotide
  Full comp hsa-miR-299-5p MIMAT0002890
atgtatgtgggacggtaaacca

SEQ ID NO: 4911 - DNA, 22 bp, Artificial Sequence
  Synthetic oligonucleotide
  Full comp hsa-miR-6803-5p MIMAT0027506
acgcccagccccccacccccag

SEQ ID NO: 4912 - DNA, 22 bp, Artificial Sequence
  Synthetic oligonucleotide
  Full comp hsa-miR-548p MIMAT0005934
aaagtaactgcagtttttgcta

SEQ ID NO: 4913 - DNA, 21 bp, Artificial Sequence
  Synthetic oligonucleotide
  Full comp hsa-miR-4470 MIMAT0018997
tctcggcttccacgtttgcca

SEQ ID NO: 4914 - DNA, 21 bp, Artificial Sequence
  Synthetic oligonucleotide
  Full comp hsa-miR-6788-5p MIMAT0027476
tcttcaccactcttctcccag

SEQ ID NO: 4915 - DNA, 21 bp, Artificial Sequence
  Synthetic oligonucleotide
  Full comp hsa-miR-1203 MIMAT0005866
gagctgcatcctggctccggg

SEQ ID NO: 4916 - DNA, 24 bp, Artificial Sequence
  Synthetic oligonucleotide
  Full comp hsa-miR-3137 MIMAT0015005
accccattgctcccaggctacaga

SEQ ID NO: 4917 - DNA, 22 bp, Artificial Sequence
  Synthetic oligonucleotide
  Full comp hsa-miR-615-3p MIMAT0003283
aagagggagacccaggctcgga

SEQ ID NO: 4918 - DNA, 22 bp, Artificial Sequence
  Synthetic oligonucleotide
  Full comp hsa-miR-1185-2-3p MIMAT0022713
atgagagtctccccctgtatat

SEQ ID NO: 4919 - DNA, 22 bp, Artificial Sequence
  Synthetic oligonucleotide
  Full comp hsa-miR-5691 MIMAT0022483
gctttctcggagctcagagcaa

SEQ ID NO: 4920 - DNA, 19 bp, Artificial Sequence
  Synthetic oligonucleotide
  Full comp hsa-miR-6776-5p MIMAT0027452
aacccccactgcacccaga

SEQ ID NO: 4921 - DNA, 22 bp, Artificial Sequence
  Synthetic oligonucleotide
  Full comp hsa-miR-548ad-3p MIMAT0018946
tgcaaaagtcattgtcgttttc

SEQ ID NO: 4922 - DNA, 22 bp, Artificial Sequence
  Synthetic oligonucleotide
  Full comp hsa-miR-524-5p MIMAT0002849
gagaaagtgcttccctttgtag

SEQ ID NO: 4923 - DNA, 22 bp, Artificial Sequence
  Synthetic oligonucleotide
  Full comp hsa-miR-3685 MIMAT0018113
agtcttcaggtagggtaggaaa

SEQ ID NO: 4924 - DNA, 18 bp, Artificial Sequence
  Synthetic oligonucleotide
  Full comp hsa-miR-7977 MIMAT0031180
tggtgcgttggctgggaa

SEQ ID NO: 4925 - DNA, 22 bp, Artificial Sequence
  Synthetic oligonucleotide
  Full comp hsa-miR-4787-5p MIMAT0019956
gggatgccgccgccacccccgc

SEQ ID NO: 4926 - DNA, 22 bp, Artificial Sequence
  Synthetic oligonucleotide
  Full comp hsa-miR-519d-3p MIMAT0002853
cactctaaagggaggcactttg

SEQ ID NO: 4927 - DNA, 23 bp, Artificial Sequence
  Synthetic oligonucleotide
  Full comp hsa-miR-449c-3p MIMAT0013771
acagagaggagtgcaactagcaa

SEQ ID NO: 4928 - DNA, 22 bp, Artificial Sequence
  Synthetic oligonucleotide
  Full comp hsa-miR-5581-3p MIMAT0022276
ggaacttctaggaggcatggaa

SEQ ID NO: 4929 - DNA, 22 bp, Artificial Sequence
  Synthetic oligonucleotide
  Full comp hsa-miR-10b-3p MIMAT0004556
attcccctagaatcgaatctgt

SEQ ID NO: 4930 - DNA, 22 bp, Artificial Sequence
  Synthetic oligonucleotide
  Full comp hsa-miR-454-5p MIMAT0003884
gcagagacaatattgatagggt

SEQ ID NO: 4931 - DNA, 22 bp, Artificial Sequence
  Synthetic oligonucleotide
  Full comp hsa-miR-548ay-3p MIMAT0025453
tgcaagagtaatcgcggttttg

SEQ ID NO: 4932 - DNA, 22 bp, Artificial Sequence
  Synthetic oligonucleotide
  Full comp hsa-miR-5579-3p MIMAT0022270
gatctggtactccttaagctaa

SEQ ID NO: 4933 - DNA, 17 bp, Artificial Sequence
  Synthetic oligonucleotide
  Full comp hsa-miR-4451 MIMAT0018973
tgtcctcagctctacca

SEQ ID NO: 4934 - DNA, 22 bp, Artificial Sequence
  Synthetic oligonucleotide
  Full comp hsa-miR-5100 MIMAT0022259
agaggcaccgctgggatctgaa

SEQ ID NO: 4935 - DNA, 22 bp, Artificial Sequence
  Synthetic oligonucleotide
  Full comp hsa-miR-1273e MIMAT0018079
tccacttcctgggttcaagcaa

SEQ ID NO: 4936 - DNA, 22 bp, Artificial Sequence
  Synthetic oligonucleotide
  Full comp hsa-miR-337-3p MIMAT0000754
gaagaaaggcatcatataggag

SEQ ID NO: 4937 - DNA, 22 bp, Artificial Sequence
  Synthetic oligonucleotide
  Full comp hsa-miR-92a-3p MIMAT0000092
acaggccgggacaagtgcaata

SEQ ID NO: 4938 - DNA, 21 bp, Artificial Sequence
  Synthetic oligonucleotide
  Full comp hsa-miR-6852-5p MIMAT0027604
catgtcctcagaaccccaggg

SEQ ID NO: 4939 - DNA, 24 bp, Artificial Sequence
  Synthetic oligonucleotide
  Full comp hsa-miR-4763-3p MIMAT0019913
cccgcccagcaccagcccctgcct

SEQ ID NO: 4940 - DNA, 17 bp, Artificial Sequence
  Synthetic oligonucleotide
  Full comp hsa-miR-302f MIMAT0005932
aaacatggaagcaatta

SEQ ID NO: 4941 - DNA, 22 bp, Artificial Sequence
  Synthetic oligonucleotide
  Full comp hsa-miR-660-5p MIMAT0003338
caactccgatatgcaatgggta

SEQ ID NO: 4942 - DNA, 22 bp, Artificial Sequence
  Synthetic oligonucleotide
  Full comp hsa-miR-548i MIMAT0005935
ggcaaaatccgcaattactttt

SEQ ID NO: 4943 - DNA, 24 bp, Artificial Sequence
  Synthetic oligonucleotide
  Full comp hsa-miR-6089 MIMAT0023714
ccgccccgccccaccccggcctcc

SEQ ID NO: 4944 - DNA, 21 bp, Artificial Sequence
  Synthetic oligonucleotide
  Full comp hsa-miR-520a-5p MIMAT0002833
agaaagtacttccctctggag

SEQ ID NO: 4945 - DNA, 22 bp, Artificial Sequence
  Synthetic oligonucleotide
  Full comp hsa-miR-4533 MIMAT0019072
agcgtccggcaacctccttcca

SEQ ID NO: 4946 - DNA, 23 bp, Artificial Sequence
  Synthetic oligonucleotide
  Full comp hsa-miR-7153-5p MIMAT0028216
cctaccacatttgtcagttctca

SEQ ID NO: 4947 - DNA, 21 bp, Artificial Sequence
  Synthetic oligonucleotide
  Full comp hsa-miR-151a-3p MIMAT0000757
cctcaaggagcttcagtctag

SEQ ID NO: 4948 - DNA, 18 bp, Artificial Sequence
  Synthetic oligonucleotide
  Full comp hsa-miR-3155b MIMAT0019012
tcccactgcagagcctgg

SEQ ID NO: 4949 - DNA, 22 bp, Artificial Sequence
  Synthetic oligonucleotide
  Full comp hsa-miR-3941 MIMAT0018357
tatgatcctcagttgtgtgtaa

SEQ ID NO: 4950 - DNA, 22 bp, Artificial Sequence
  Synthetic oligonucleotide
  Full comp hsa-miR-200c-5p MIMAT0004657
ccaaacactgctgggtaagacg

SEQ ID NO: 4951 - DNA, 18 bp, Artificial Sequence
  Synthetic oligonucleotide
  Full comp hsa-miR-1178-5p MIMAT0022940
catgctcagctgaccctg

SEQ ID NO: 4952 - DNA, 22 bp, Artificial Sequence
  Synthetic oligonucleotide
  Full comp hsa-miR-26b-3p MIMAT0004500
gagccaagtaatggagaacagg

SEQ ID NO: 4953 - DNA, 22 bp, Artificial Sequence
  Synthetic oligonucleotide
  Full comp hsa-miR-8077 MIMAT0031004
ggagtcagaaccccactcagcc

SEQ ID NO: 4954 - DNA, 21 bp, Artificial Sequence
  Synthetic oligonucleotide
  Full comp hsa-miR-1468-5p MIMAT0006789
cagcgaaacaggcaaacggag

SEQ ID NO: 4955 - DNA, 21 bp, Artificial Sequence
  Synthetic oligonucleotide
  Full comp hsa-miR-6715b-5p MIMAT0025842
tgccaaaccagtcgtgcctgt

SEQ ID NO: 4956 - DNA, 22 bp, Artificial Sequence
  Synthetic oligonucleotide
  Full comp hsa-miR-523-5p MIMAT0005449
cagaaagcgcttccctctagag

SEQ ID NO: 4957 - DNA, 20 bp, Artificial Sequence
  Synthetic oligonucleotide
  Full comp hsa-miR-6794-3p MIMAT0027489
agggagggactgagagtgag

SEQ ID NO: 4958 - DNA, 22 bp, Artificial Sequence
  Synthetic oligonucleotide
  Full comp hsa-miR-4796-3p MIMAT0019971
gtgtctatactctgccacttta

SEQ ID NO: 4959 - DNA, 17 bp, Artificial Sequence
  Synthetic oligonucleotide
  Full comp hsa-miR-4262 MIMAT0016894
caggtagtctgaatgtc

SEQ ID NO: 4960 - DNA, 22 bp, Artificial Sequence
  Synthetic oligonucleotide
  Full comp hsa-miR-582-3p MIMAT0004797
ggttcagttgttcaaccagtta

SEQ ID NO: 4961 - DNA, 21 bp, Artificial Sequence
  Synthetic oligonucleotide
  Full comp hsa-miR-4433a-3p MIMAT0018949
atgtcccacccccactcctgt

SEQ ID NO: 4962 - DNA, 22 bp, Artificial Sequence
  Synthetic oligonucleotide
  Full comp hsa-miR-106b-3p MIMAT0004672
gcagcaagtacccacagtgcgg

SEQ ID NO: 4963 - DNA, 21 bp, Artificial Sequence
  Synthetic oligonucleotide
  Full comp hsa-miR-6854-3p MIMAT0027609
ctgctcaagaggagaaacgca

SEQ ID NO: 4964 - DNA, 21 bp, Artificial Sequence
  Synthetic oligonucleotide
  Full comp hsa-miR-5571-5p MIMAT0022257
gggaggctcctttgagaattg

SEQ ID NO: 4965 - DNA, 22 bp, Artificial Sequence
  Synthetic oligonucleotide
  Full comp hsa-miR-3148 MIMAT0015021
aagcacacaccagttttttcca

SEQ ID NO: 4966 - DNA, 22 bp, Artificial Sequence
  Synthetic oligonucleotide
  Full comp hsa-miR-433-5p MIMAT0026554
gaataatgacaggctcaccgta

SEQ ID NO: 4967 - DNA, 22 bp, Artificial Sequence
  Synthetic oligonucleotide
  Full comp hsa-miR-1269b MIMAT0019059
ccagtagcatggctcagtccag

SEQ ID NO: 4968 - DNA, 22 bp, Artificial Sequence
  Synthetic oligonucleotide
  Full comp hsa-miR-4762-3p MIMAT0019911
caccacaaatcttgatcagaag

SEQ ID NO: 4969 - DNA, 22 bp, Artificial Sequence
  Synthetic oligonucleotide
  Full comp hsa-miR-942-5p MIMAT0004985
cacatggccaaaacagagaaga

SEQ ID NO: 4970 - DNA, 20 bp, Artificial Sequence
  Synthetic oligonucleotide
  Full comp hsa-miR-4324 MIMAT0016876
ttaaggttagggtctcaggg

SEQ ID NO: 4971 - DNA, 22 bp, Artificial Sequence
  Synthetic oligonucleotide
  Full comp hsa-miR-129-2-3p MIMAT0004605
atgctttttggggtaagggctt

SEQ ID NO: 4972 - DNA, 21 bp, Artificial Sequence
  Synthetic oligonucleotide
  Full comp hsa-miR-6739-3p MIMAT0027380
ctgggagaaagacagaacaat

SEQ ID NO: 4973 - DNA, 23 bp, Artificial Sequence
  Synthetic oligonucleotide
  Full comp hsa-miR-3177-5p MIMAT0019215
agcgcctggcacgtgtgtacaca

SEQ ID NO: 4974 - DNA, 17 bp, Artificial Sequence
  Synthetic oligonucleotide
  Full comp hsa-miR-4492 MIMAT0019027
ggcgcgcgcccagcccc

SEQ ID NO: 4975 - DNA, 22 bp, Artificial Sequence
  Synthetic oligonucleotide
  Full comp hsa-miR-4779 MIMAT0019938
ctgcttttactattccctccta

SEQ ID NO: 4976 - DNA, 22 bp, Artificial Sequence
  Synthetic oligonucleotide
  Full comp hsa-miR-3126-3p MIMAT0015377
tctgtgtgacggatgccagatg

SEQ ID NO: 4977 - DNA, 23 bp, Artificial Sequence
  Synthetic oligonucleotide
  Full comp hsa-miR-6760-5p MIMAT0027420
tctgcacttccaccttctccctg

SEQ ID NO: 4978 - DNA, 22 bp, Artificial Sequence
  Synthetic oligonucleotide
  Full comp hsa-miR-5001-3p MIMAT0021022
aaggacctggacagaggcagaa

SEQ ID NO: 4979 - DNA, 24 bp, Artificial Sequence
  Synthetic oligonucleotide
  Full comp hsa-miR-3145-3p MIMAT0015016
caattccaaacactcaaaatatct

SEQ ID NO: 4980 - DNA, 22 bp, Artificial Sequence
  Synthetic oligonucleotide
  Full comp hsa-miR-7109-3p MIMAT0028116
ctggaagggcaggagaggcttg

SEQ ID NO: 4981 - DNA, 22 bp, Artificial Sequence
  Synthetic oligonucleotide
  Full comp hsa-miR-4670-5p MIMAT0019750
tgaagttacatcatggtcgctt

SEQ ID NO: 4982 - DNA, 22 bp, Artificial Sequence
  Synthetic oligonucleotide
  Full comp hsa-miR-98-5p MIMAT0000096
aacaatacaacttactacctca

SEQ ID NO: 4983 - DNA, 22 bp, Artificial Sequence
  Synthetic oligonucleotide
  Full comp hsa-miR-6827-5p MIMAT0027554
gcacagaccctcatggctccca

SEQ ID NO: 4984 - DNA, 22 bp, Artificial Sequence
  Synthetic oligonucleotide
  Full comp hsa-miR-29a-3p MIMAT0000086
taaccgatttcagatggtgcta

SEQ ID NO: 4985 - DNA, 23 bp, Artificial Sequence
  Synthetic oligonucleotide
  Full comp hsa-miR-7113-3p MIMAT0028124
ctgcagagaggcgggcagggagg

SEQ ID NO: 4986 - DNA, 24 bp, Artificial Sequence
  Synthetic oligonucleotide
  Full comp hsa-miR-362-5p MIMAT0000705
actcacacctaggttccaaggatt

SEQ ID NO: 4987 - DNA, 21 bp, Artificial Sequence
  Synthetic oligonucleotide
  Full comp hsa-miR-1286 MIMAT0005877
agggctcatcttggtcctgca

SEQ ID NO: 4988 - DNA, 22 bp, Artificial Sequence
  Synthetic oligonucleotide
  Full comp hsa-miR-505-3p MIMAT0002876
aggaaaccagcaagtgttgacg

SEQ ID NO: 4989 - DNA, 23 bp, Artificial Sequence
  Synthetic oligonucleotide
  Full comp hsa-miR-3675-5p MIMAT0018098
gaaatctctacagaagccccata

SEQ ID NO: 4990 - DNA, 22 bp, Artificial Sequence
  Synthetic oligonucleotide
  Full comp hsa-miR-7855-5p MIMAT0030430
ccgagcttggggtcctcaccaa

SEQ ID NO: 4991 - DNA, 22 bp, Artificial Sequence
  Synthetic oligonucleotide
  Full comp hsa-miR-15a-5p MIMAT0000068
cacaaaccattatgtgctgcta

SEQ ID NO: 4992 - DNA, 22 bp, Artificial Sequence
  Synthetic oligonucleotide
  Full comp hsa-miR-548as-5p MIMAT0022267
ggcaaaacccgcaattactttt

SEQ ID NO: 4993 - DNA, 22 bp, Artificial Sequence
  Synthetic oligonucleotide
  Full comp hsa-miR-642b-5p MIMAT0022736
agacacatttggagagggaacc

SEQ ID NO: 4994 - DNA, 24 bp, Artificial Sequence
  Synthetic oligonucleotide
  Full comp hsa-miR-619-3p MIMAT0003288
actgggcacaaacatgtccaggtc

SEQ ID NO: 4995 - DNA, 20 bp, Artificial Sequence
  Synthetic oligonucleotide
  Full comp hsa-miR-550a-3-5p MIMAT0020925
ctcttactccctcaggcact

SEQ ID NO: 4996 - DNA, 20 bp, Artificial Sequence
  Synthetic oligonucleotide
  Full comp hsa-miR-3622b-5p MIMAT0018005
tcacctgacctcccatgcct

SEQ ID NO: 4997 - DNA, 23 bp, Artificial Sequence
  Synthetic oligonucleotide
  Full comp hsa-miR-6777-5p MIMAT0027454
tccaccactgcctgactccccgt

SEQ ID NO: 4998 - DNA, 22 bp, Artificial Sequence
  Synthetic oligonucleotide
  Full comp hsa-miR-302d-5p MIMAT0004685
gcaagtgcctccatgttaaagt

SEQ ID NO: 4999 - DNA, 20 bp, Artificial Sequence
  Synthetic oligonucleotide
  Full comp hsa-miR-147a MIMAT0000251
gcagaagcatttccacacac

SEQ ID NO: 5000 - DNA, 25 bp, Artificial Sequence
  Synthetic oligonucleotide
  Full comp hsa-miR-1273a MIMAT0005926
aagaaagagtcttgctttgtcgccc

SEQ ID NO: 5001 - DNA, 23 bp, Artificial Sequence
  Synthetic oligonucleotide
  Full comp hsa-miR-432-5p MIMAT0002814
ccacccaatgacctactccaaga

SEQ ID NO: 5002 - DNA, 21 bp, Artificial Sequence
  Synthetic oligonucleotide
  Full comp hsa-miR-204-3p MIMAT0022693
acgtccctttgccttcccagc

SEQ ID NO: 5003 - DNA, 23 bp, Artificial Sequence
  Synthetic oligonucleotide
  Full comp hsa-miR-3663-3p MIMAT0018085
gcgcccggcctgtgtggtgctca

SEQ ID NO: 5004 - DNA, 23 bp, Artificial Sequence
  Synthetic oligonucleotide
  Full comp hsa-miR-5093 MIMAT0021085
gctcctagccagcctcatttcct

SEQ ID NO: 5005 - DNA, 22 bp, Artificial Sequence
  Synthetic oligonucleotide
  Full comp hsa-miR-1913 MIMAT0007888
tggcagcagcggagggggcaga

SEQ ID NO: 5006 - DNA, 22 bp, Artificial Sequence
  Synthetic oligonucleotide
  Full comp hsa-miR-4529-5p MIMAT0019236
ttcattggactgctgatggcct

SEQ ID NO: 5007 - DNA, 23 bp, Artificial Sequence
  Synthetic oligonucleotide
  Full comp hsa-miR-4666b MIMAT0022485
gggaattacaatctgacatgcaa

SEQ ID NO: 5008 - DNA, 21 bp, Artificial Sequence
  Synthetic oligonucleotide
  Full comp hsa-miR-6886-5p MIMAT0027672
agccctcatctcacctgcggg

SEQ ID NO: 5009 - DNA, 18 bp, Artificial Sequence
  Synthetic oligonucleotide
  Full comp hsa-miR-4309 MIMAT0016859
tggaatcctagactccag

SEQ ID NO: 5010 - DNA, 24 bp, Artificial Sequence
  Synthetic oligonucleotide
  Full comp hsa-miR-3184-5p MIMAT0015064
aaaagctcggtctgaggcccctca

SEQ ID NO: 5011 - DNA, 20 bp, Artificial Sequence
  Synthetic oligonucleotide
  Full comp hsa-miR-4633-5p MIMAT0019689
gaggagctagccaggcatat

SEQ ID NO: 5012 - DNA, 19 bp, Artificial Sequence
  Synthetic oligonucleotide
  Full comp hsa-miR-4290 MIMAT0016921
gagggaagaaaggagggca

SEQ ID NO: 5013 - DNA, 22 bp, Artificial Sequence
  Synthetic oligonucleotide
  Full comp hsa-miR-345-3p MIMAT0022698
ctccagacccctcgttcagggc

SEQ ID NO: 5014 - DNA, 19 bp, Artificial Sequence
  Synthetic oligonucleotide
  Full comp hsa-miR-3176 MIMAT0015053
ccggtagtcccaggccagt

SEQ ID NO: 5015 - DNA, 21 bp, Artificial Sequence
  Synthetic oligonucleotide
  Full comp hsa-miR-6824-3p MIMAT0027549
ctggggtggcaagaccagaga

SEQ ID NO: 5016 - DNA, 21 bp, Artificial Sequence
  Synthetic oligonucleotide
  Full comp hsa-miR-502-5p MIMAT0002873
tagcacccagatagcaaggat

SEQ ID NO: 5017 - DNA, 19 bp, Artificial Sequence
  Synthetic oligonucleotide
  Full comp hsa-miR-7641 MIMAT0029782
gcttagcttccgagatcaa

SEQ ID NO: 5018 - DNA, 22 bp, Artificial Sequence
  Synthetic oligonucleotide
  Full comp hsa-miR-1180-3p MIMAT0005825
acacacccacgcgagccggaaa

SEQ ID NO: 5019 - DNA, 21 bp, Artificial Sequence
  Synthetic oligonucleotide
  Full comp hsa-miR-4464 MIMAT0018988
tattgcatctatccaaacctt

SEQ ID NO: 5020 - DNA, 21 bp, Artificial Sequence
  Synthetic oligonucleotide
  Full comp hsa-miR-5187-3p MIMAT0021118
ctgaggaaaagaggattcagt

SEQ ID NO: 5021 - DNA, 21 bp, Artificial Sequence
  Synthetic oligonucleotide
  Full comp hsa-miR-3944-5p MIMAT0019231
tctcggttggcctgctgcaca

SEQ ID NO: 5022 - DNA, 23 bp, Artificial Sequence
  Synthetic oligonucleotide
  Full comp hsa-miR-664a-3p MIMAT0005949
tgtaggctggggataaatgaata

SEQ ID NO: 5023 - DNA, 22 bp, Artificial Sequence
  Synthetic oligonucleotide
  Full comp hsa-miR-548at-5p MIMAT0022277
agccaaaaccgcaataactttt

SEQ ID NO: 5024 - DNA, 20 bp, Artificial Sequence
  Synthetic oligonucleotide
  Full comp hsa-miR-591 MIMAT0003259
acaatgagaacccatggtct

SEQ ID NO: 5025 - DNA, 22 bp, Artificial Sequence
  Synthetic oligonucleotide
  Full comp hsa-miR-143-5p MIMAT0004599
accagagatgcagcactgcacc

SEQ ID NO: 5026 - DNA, 22 bp, Artificial Sequence
  Synthetic oligonucleotide
  Full comp hsa-miR-383-5p MIMAT0000738
agccacaatcaccttctgatct

SEQ ID NO: 5027 - DNA, 22 bp, Artificial Sequence
  Synthetic oligonucleotide
  Full comp hsa-miR-4753-5p MIMAT0019890
ctgttctcttcctttggccttg

SEQ ID NO: 5028 - DNA, 25 bp, Artificial Sequence
  Synthetic oligonucleotide
  Full comp hsa-miR-6885-5p MIMAT0027670
ggctttgcttgcgcagtgcccccct

SEQ ID NO: 5029 - DNA, 23 bp, Artificial Sequence
  Synthetic oligonucleotide
  Full comp hsa-miR-503-5p MIMAT0002874
ctgcagaactgttcccgctgcta

SEQ ID NO: 5030 - DNA, 21 bp, Artificial Sequence
  Synthetic oligonucleotide
  Full comp hsa-miR-6875-5p MIMAT0027650
tctcctgtcctgggtccctca

SEQ ID NO: 5031 - DNA, 22 bp, Artificial Sequence
  Synthetic oligonucleotide
  Full comp hsa-miR-1234-3p MIMAT0005589
gtggggtgggtggtcaggccga

SEQ ID NO: 5032 - DNA, 22 bp, Artificial Sequence
  Synthetic oligonucleotide
  Full comp hsa-miR-19a-5p MIMAT0004490
tgtagtgcaactatgcaaaact

SEQ ID NO: 5033 - DNA, 21 bp, Artificial Sequence
  Synthetic oligonucleotide
  Full comp hsa-miR-6779-5p MIMAT0027458
gccaaacccagcccctcccag

SEQ ID NO: 5034 - DNA, 20 bp, Artificial Sequence
  Synthetic oligonucleotide
  Full comp hsa-miR-1233-3p MIMAT0005588
ctgcgggaggacagggctca

SEQ ID NO: 5035 - DNA, 23 bp, Artificial Sequence
  Synthetic oligonucleotide
  Full comp hsa-miR-6769b-5p MIMAT0027620
gcacttctcctccccacccacca

SEQ ID NO: 5036 - DNA, 22 bp, Artificial Sequence
  Synthetic oligonucleotide
  Full comp hsa-miR-133a-5p MIMAT0026478
atttggttccattttaccagct

SEQ ID NO: 5037 - DNA, 19 bp, Artificial Sequence
  Synthetic oligonucleotide
  Full comp hsa-miR-2861 MIMAT0013802
ccgcccaccgccaggcccc

SEQ ID NO: 5038 - DNA, 23 bp, Artificial Sequence
  Synthetic oligonucleotide
  Full comp hsa-miR-6501-3p MIMAT0025459
actgttaccgcaggctgctctgg

SEQ ID NO: 5039 - DNA, 19 bp, Artificial Sequence
  Synthetic oligonucleotide
  Full comp hsa-miR-1260b MIMAT0015041
atggtggcagtggtgggat

SEQ ID NO: 5040 - DNA, 21 bp, Artificial Sequence
  Synthetic oligonucleotide
  Full comp hsa-miR-4536-3p MIMAT0020959
atgtggtagatatatgcacga

SEQ ID NO: 5041 - DNA, 22 bp, Artificial Sequence
  Synthetic oligonucleotide
  Full comp hsa-miR-185-3p MIMAT0004611
gaccagaggaaagccagcccct

SEQ ID NO: 5042 - DNA, 21 bp, Artificial Sequence
  Synthetic oligonucleotide
  Full comp hsa-miR-4529-3p MIMAT0019068
acgggccatcagcagtccaat

SEQ ID NO: 5043 - DNA, 25 bp, Artificial Sequence
  Synthetic oligonucleotide
  Full comp hsa-miR-1273d MIMAT0015090
actgcagcctcaacctcatgggttc

SEQ ID NO: 5044 - DNA, 22 bp, Artificial Sequence
  Synthetic oligonucleotide
  Full comp hsa-miR-1243 MIMAT0005894
cactcctataattgatccagtt

SEQ ID NO: 5045 - DNA, 22 bp, Artificial Sequence
  Synthetic oligonucleotide
  Full comp hsa-miR-4738-5p MIMAT0019866
atgaaactgaaaacgcgctggt

SEQ ID NO: 5046 - DNA, 22 bp, Artificial Sequence
  Synthetic oligonucleotide
  Full comp hsa-miR-761 MIMAT0010364
tgtgtcagtttcaccctgctgc

SEQ ID NO: 5047 - DNA, 21 bp, Artificial Sequence
  Synthetic oligonucleotide
  Full comp hsa-miR-5190 MIMAT0021121
tggctccagctcagtcactgg

SEQ ID NO: 5048 - DNA, 22 bp, Artificial Sequence
  Synthetic oligonucleotide
  Full comp hsa-miR-6835-5p MIMAT0027570
cttcagccactttctaccccct

SEQ ID NO: 5049 - DNA, 21 bp, Artificial Sequence
  Synthetic oligonucleotide
  Full comp hsa-miR-4712-3p MIMAT0019819
atacagtacaggtctctcatt

SEQ ID NO: 5050 - DNA, 21 bp, Artificial Sequence
  Synthetic oligonucleotide
  Full comp hsa-miR-6750-3p MIMAT0027401
ctgggagcagagggtgagttc

SEQ ID NO: 5051 - DNA, 21 bp, Artificial Sequence
  Synthetic oligonucleotide
  Full comp hsa-miR-6778-3p MIMAT0027457
ctgtggaatgtcagggaggca

SEQ ID NO: 5052 - DNA, 17 bp, Artificial Sequence
  Synthetic oligonucleotide
  Full comp hsa-miR-4481 MIMAT0019015
aaccaccagcccactcc

SEQ ID NO: 5053 - DNA, 22 bp, Artificial Sequence
  Synthetic oligonucleotide
  Full comp hsa-miR-449b-5p MIMAT0003327
gccagctaacaatacactgcct

SEQ ID NO: 5054 - DNA, 22 bp, Artificial Sequence
  Synthetic oligonucleotide
  Full comp hsa-miR-4636 MIMAT0019693
ctaaaggctttgaacacgagtt

SEQ ID NO: 5055 - DNA, 22 bp, Artificial Sequence
  Synthetic oligonucleotide
  Full comp hsa-miR-6719-3p MIMAT0025850
caggagaatcactgatgtcaga

SEQ ID NO: 5056 - DNA, 22 bp, Artificial Sequence
  Synthetic oligonucleotide
  Full comp hsa-miR-4652-5p MIMAT0019716
tagttctattaaccagtcccct

SEQ ID NO: 5057 - DNA, 17 bp, Artificial Sequence
  Synthetic oligonucleotide
  Full comp hsa-miR-4318 MIMAT0016869
agcatgtacccacagtg

SEQ ID NO: 5058 - DNA, 18 bp, Artificial Sequence
  Synthetic oligonucleotide
  Full comp hsa-miR-7153-3p MIMAT0028217
ggtaaaccgtccatggtg

SEQ ID NO: 5059 - DNA, 22 bp, Artificial Sequence
  Synthetic oligonucleotide
  Full comp hsa-miR-1262 MIMAT0005914
atccttctacaaattcacccat

SEQ ID NO: 5060 - DNA, 22 bp, Artificial Sequence
  Synthetic oligonucleotide
  Full comp hsa-miR-4795-3p MIMAT0019969
atccagaagtggctaataatat

SEQ ID NO: 5061 - DNA, 22 bp, Artificial Sequence
  Synthetic oligonucleotide
  Full comp hsa-miR-29c-5p MIMAT0004673
gaacaccaggagaaatcggtca

SEQ ID NO: 5062 - DNA, 22 bp, Artificial Sequence
  Synthetic oligonucleotide
  Full comp hsa-miR-374b-5p MIMAT0004955
cacttagcaggttgtattatat

SEQ ID NO: 5063 - DNA, 22 bp, Artificial Sequence
  Synthetic oligonucleotide
  Full comp hsa-miR-30c-1-3p MIMAT0004674
ggagtaaacaaccctctcccag

SEQ ID NO: 5064 - DNA, 22 bp, Artificial Sequence
  Synthetic oligonucleotide
  Full comp hsa-miR-616-3p MIMAT0004805
ctgctcaaaccctccaatgact

SEQ ID NO: 5065 - DNA, 23 bp, Artificial Sequence
  Synthetic oligonucleotide
  Full comp hsa-miR-548w MIMAT0015060
aggcaaaaaccgcagttactttt

SEQ ID NO: 5066 - DNA, 22 bp, Artificial Sequence
  Synthetic oligonucleotide
  Full comp hsa-miR-561-5p MIMAT0022706
ggcaaagtttaagatccttgat

SEQ ID NO: 5067 - DNA, 22 bp, Artificial Sequence
  Synthetic oligonucleotide
  Full comp hsa-miR-4445-5p MIMAT0018963
tgcacggcaaaagaaacaatct

SEQ ID NO: 5068 - DNA, 22 bp, Artificial Sequence
  Synthetic oligonucleotide
  Full comp hsa-miR-4786-3p MIMAT0019955
gcccagaccagagctggcttca

SEQ ID NO: 5069 - DNA, 22 bp, Artificial Sequence
  Synthetic oligonucleotide
  Full comp hsa-miR-23b-5p MIMAT0004587
aaatcagcatgccaggaaccca

SEQ ID NO: 5070 - DNA, 23 bp, Artificial Sequence
  Synthetic oligonucleotide
  Full comp hsa-miR-802 MIMAT0004185
acaaggatgaatctttgttactg

SEQ ID NO: 5071 - DNA, 22 bp, Artificial Sequence
  Synthetic oligonucleotide
  Full comp hsa-miR-125b-5p MIMAT0000423
tcacaagttagggtctcaggga

SEQ ID NO: 5072 - DNA, 21 bp, Artificial Sequence
  Synthetic oligonucleotide
  Full comp hsa-miR-596 MIMAT0003264
cccgaggagccgggcaggctt

SEQ ID NO: 5073 - DNA, 21 bp, Artificial Sequence
  Synthetic oligonucleotide
  Full comp hsa-miR-6804-5p MIMAT0027508
cgtcacctgctgacaccctca

SEQ ID NO: 5074 - DNA, 24 bp, Artificial Sequence
  Synthetic oligonucleotide
  Full comp hsa-miR-3651 MIMAT0018071
tcatgtaccagcgaccgggctatg

SEQ ID NO: 5075 - DNA, 22 bp, Artificial Sequence
  Synthetic oligonucleotide
  Full comp hsa-miR-545-5p MIMAT0004785
tcatctaataaacatttactga

SEQ ID NO: 5076 - DNA, 22 bp, Artificial Sequence
  Synthetic oligonucleotide
  Full comp hsa-miR-371b-5p MIMAT0019892
aaagtgccgccatcttttgagt

SEQ ID NO: 5077 - DNA, 22 bp, Artificial Sequence
  Synthetic oligonucleotide
  Full comp hsa-miR-4773 MIMAT0019928
gcctttctatgctcctgttctg

SEQ ID NO: 5078 - DNA, 18 bp, Artificial Sequence
  Synthetic oligonucleotide
  Full comp hsa-miR-4468 MIMAT0018995
atctcatccttctgctct

SEQ ID NO: 5079 - DNA, 25 bp, Artificial Sequence
  Synthetic oligonucleotide
  Full comp hsa-miR-519d-5p MIMAT0026610
aacagaaagcgcttccctttggagg

SEQ ID NO: 5080 - DNA, 22 bp, Artificial Sequence
  Synthetic oligonucleotide
  Full comp hsa-miR-4653-5p MIMAT0019718
ggtgttaagccttgctcagaga

SEQ ID NO: 5081 - DNA, 22 bp, Artificial Sequence
  Synthetic oligonucleotide
  Full comp hsa-miR-516b-5p MIMAT0002859
aaagtgcttcttacctccagat

SEQ ID NO: 5082 - DNA, 23 bp, Artificial Sequence
  Synthetic oligonucleotide
  Full comp hsa-miR-302c-3p MIMAT0000717
ccactgaaacatggaagcactta

SEQ ID NO: 5083 - DNA, 21 bp, Artificial Sequence
  Synthetic oligonucleotide
  Full comp hsa-miR-671-3p MIMAT0004819
ggtggagccctgagaaccgga

SEQ ID NO: 5084 - DNA, 19 bp, Artificial Sequence
  Synthetic oligonucleotide
  Full comp hsa-miR-1261 MIMAT0005913
aagccaaagccttatccat

SEQ ID NO: 5085 - DNA, 22 bp, Artificial Sequence
  Synthetic oligonucleotide
  Full comp hsa-miR-545-3p MIMAT0003165
gcacacaataaatgtttgctga

SEQ ID NO: 5086 - DNA, 22 bp, Artificial Sequence
  Synthetic oligonucleotide
  Full comp hsa-miR-184 MIMAT0000454
acccttatcagttctccgtcca

SEQ ID NO: 5087 - DNA, 27 bp, Artificial Sequence
  Synthetic oligonucleotide
  Full comp hsa-miR-7107-3p MIMAT0028112
ggccaaaaagagagaatgaacagacca

SEQ ID NO: 5088 - DNA, 21 bp, Artificial Sequence
  Synthetic oligonucleotide
  Full comp hsa-miR-7151-3p MIMAT0028213
tgagcccattccagcctgtag

SEQ ID NO: 5089 - DNA, 22 bp, Artificial Sequence
  Synthetic oligonucleotide
  Full comp hsa-miR-93-3p MIMAT0004509
cgggaagtgctagctcagcagt

SEQ ID NO: 5090 - DNA, 23 bp, Artificial Sequence
  Synthetic oligonucleotide
  Full comp hsa-miR-128-2-5p MIMAT0031095
tctcgtacagtgtatcggccccc

SEQ ID NO: 5091 - DNA, 23 bp, Artificial Sequence
  Synthetic oligonucleotide
  Full comp hsa-miR-135b-5p MIMAT0000758
tcacataggaatgaaaagccata

SEQ ID NO: 5092 - DNA, 21 bp, Artificial Sequence
  Synthetic oligonucleotide
  Full comp hsa-miR-548j-3p MIMAT0026737
gcaaaagtaatgcagtttttg

SEQ ID NO: 5093 - DNA, 21 bp, Artificial Sequence
  Synthetic oligonucleotide
  Full comp hsa-miR-195-5p MIMAT0000461
gccaatatttctgtgctgcta

SEQ ID NO: 5094 - DNA, 22 bp, Artificial Sequence
  Synthetic oligonucleotide
  Full comp hsa-miR-651-3p MIMAT0026624
cttttaggatacactttccttt

SEQ ID NO: 5095 - DNA, 22 bp, Artificial Sequence
  Synthetic oligonucleotide
  Full comp hsa-miR-125a-3p MIMAT0004602
ggctcccaagaacctcacctgt

SEQ ID NO: 5096 - DNA, 23 bp, Artificial Sequence
  Synthetic oligonucleotide
  Full comp hsa-miR-328-5p MIMAT0026486
ccctgagcccctcctgccccccc

SEQ ID NO: 5097 - DNA, 21 bp, Artificial Sequence
  Synthetic oligonucleotide
  Full comp hsa-miR-8057 MIMAT0030984
tccatcttactacagagccac

SEQ ID NO: 5098 - DNA, 23 bp, Artificial Sequence
  Synthetic oligonucleotide
  Full comp hsa-miR-6798-5p MIMAT0027496
cccaagctcgcccatccccctgg

SEQ ID NO: 5099 - DNA, 22 bp, Artificial Sequence
  Synthetic oligonucleotide
  Full comp hsa-let-7a-2-3p MIMAT0010195
ggaaagctaggaggctgtacag

SEQ ID NO: 5100 - DNA, 17 bp, Artificial Sequence
  Synthetic oligonucleotide
  Full comp hsa-miR-4258 MIMAT0016879
ccaaggcggtggcgggg

SEQ ID NO: 5101 - DNA, 21 bp, Artificial Sequence
  Synthetic oligonucleotide
  Full comp hsa-miR-6819-3p MIMAT0027539
ctggggtggggacagaggctt

SEQ ID NO: 5102 - DNA, 23 bp, Artificial Sequence
  Synthetic oligonucleotide
  Full comp hsa-miR-224-3p MIMAT0009198
tgtagtcactagggcaccatttt

SEQ ID NO: 5103 - DNA, 22 bp, Artificial Sequence
  Synthetic oligonucleotide
  Full comp hsa-miR-520d-3p MIMAT0002856
acccaccaaagagaagcacttt

SEQ ID NO: 5104 - DNA, 22 bp, Artificial Sequence
  Synthetic oligonucleotide
  Full comp hsa-miR-6752-5p MIMAT0027404
gccccctggctccacacccccc

SEQ ID NO: 5105 - DNA, 17 bp, Artificial Sequence
  Synthetic oligonucleotide
  Full comp hsa-miR-4447 MIMAT0018966
aaacaacagcccccacc

SEQ ID NO: 5106 - DNA, 22 bp, Artificial Sequence
  Synthetic oligonucleotide
  Full comp hsa-miR-450b-5p MIMAT0004909
tattcaggaacatattgcaaaa

SEQ ID NO: 5107 - DNA, 17 bp, Artificial Sequence
  Synthetic oligonucleotide
  Full comp hsa-miR-3182 MIMAT0015062
gactacactacagaagc

SEQ ID NO: 5108 - DNA, 22 bp, Artificial Sequence
  Synthetic oligonucleotide
  Full comp hsa-miR-4704-5p MIMAT0019803
aatcactcacatgcctagtgtc

SEQ ID NO: 5109 - DNA, 24 bp, Artificial Sequence
  Synthetic oligonucleotide
  Full comp hsa-miR-6894-5p MIMAT0027688
tctggcccagctctccatcctcct

SEQ ID NO: 5110 - DNA, 24 bp, Artificial Sequence
  Synthetic oligonucleotide
  Full comp hsa-miR-6747-5p MIMAT0027394
tgttctgcctctttccacacccct

SEQ ID NO: 5111 - DNA, 19 bp, Artificial Sequence
  Synthetic oligonucleotide
  Full comp hsa-miR-4271 MIMAT0016901
ccccaccttttcttccccc

SEQ ID NO: 5112 - DNA, 18 bp, Artificial Sequence
  Synthetic oligonucleotide
  Full comp hsa-miR-4792 MIMAT0019964
gccagcgagcgctcaccg

SEQ ID NO: 5113 - DNA, 23 bp, Artificial Sequence
  Synthetic oligonucleotide
  Full comp hsa-miR-4683 MIMAT0019768
atcgggcgagcactggatctcca

SEQ ID NO: 5114 - DNA, 22 bp, Artificial Sequence
  Synthetic oligonucleotide
  Full comp hsa-miR-4790-3p MIMAT0019962
tgtgacatcgctttaccattca

SEQ ID NO: 5115 - DNA, 21 bp, Artificial Sequence
  Synthetic oligonucleotide
  Full comp hsa-miR-6737-5p MIMAT0027375
ctccagggccgaccaccccaa

SEQ ID NO: 5116 - DNA, 19 bp, Artificial Sequence
  Synthetic oligonucleotide
  Full comp hsa-miR-6082 MIMAT0023707
ggatcaaccagacgtattc

SEQ ID NO: 5117 - DNA, 23 bp, Artificial Sequence
  Synthetic oligonucleotide
  Full comp hsa-miR-4691-3p MIMAT0019782
atgcactctcagtccgtggctgg

SEQ ID NO: 5118 - DNA, 21 bp, Artificial Sequence
  Synthetic oligonucleotide
  Full comp hsa-miR-1228-5p MIMAT0005582
cacacacctgcccccgcccac

SEQ ID NO: 5119 - DNA, 19 bp, Artificial Sequence
  Synthetic oligonucleotide
  Full comp hsa-miR-3654 MIMAT0018074
ttcctcagcttgtccagtc

SEQ ID NO: 5120 - DNA, 21 bp, Artificial Sequence
  Synthetic oligonucleotide
  Full comp hsa-miR-7114-3p MIMAT0028126
ctggtggagaggggtgggtca

SEQ ID NO: 5121 - DNA, 22 bp, Artificial Sequence
  Synthetic oligonucleotide
  Full comp hsa-miR-299-3p MIMAT0000687
aagcggtttaccatcccacata

SEQ ID NO: 5122 - DNA, 23 bp, Artificial Sequence
  Synthetic oligonucleotide
  Full comp hsa-miR-636 MIMAT0003306
tgcgggcgggacgagcaagcaca

SEQ ID NO: 5123 - DNA, 23 bp, Artificial Sequence
  Synthetic oligonucleotide
  Full comp hsa-miR-4254 MIMAT0016884
gagatggtggagtagctccaggc

SEQ ID NO: 5124 - DNA, 21 bp, Artificial Sequence
  Synthetic oligonucleotide
  Full comp hsa-miR-578 MIMAT0003243
acaatcctagagcacaagaag

SEQ ID NO: 5125 - DNA, 22 bp, Artificial Sequence
  Synthetic oligonucleotide
  Full comp hsa-miR-3150b-5p MIMAT0019226
gctggggagatcctcgaggttg

SEQ ID NO: 5126 - DNA, 21 bp, Artificial Sequence
  Synthetic oligonucleotide
  Full comp hsa-miR-6834-5p MIMAT0027568
ccacaaatcccagtccctcac

SEQ ID NO: 5127 - DNA, 23 bp, Artificial Sequence
  Synthetic oligonucleotide
  Full comp hsa-miR-3174 MIMAT0015051
ggctctgcatctctaactcacta

SEQ ID NO: 5128 - DNA, 22 bp, Artificial Sequence
  Synthetic oligonucleotide
  Full comp hsa-miR-6739-5p MIMAT0027379
tacttgttctttctctttccca

SEQ ID NO: 5129 - DNA, 21 bp, Artificial Sequence
  Synthetic oligonucleotide
  Full comp hsa-miR-1206 MIMAT0005870
gcttaaacatctacatgaaca

SEQ ID NO: 5130 - DNA, 22 bp, Artificial Sequence
  Synthetic oligonucleotide
  Full comp hsa-miR-934 MIMAT0004977
ccagtgtctccagtagtagaca

SEQ ID NO: 5131 - DNA, 21 bp, Artificial Sequence
  Synthetic oligonucleotide
  Full comp hsa-miR-6823-5p MIMAT0027546
agcaacccctaccaaccctga

SEQ ID NO: 5132 - DNA, 22 bp, Artificial Sequence
  Synthetic oligonucleotide
  Full comp hsa-miR-548am-3p MIMAT0019076
acaaaagtaactgcagtttttg

SEQ ID NO: 5133 - DNA, 22 bp, Artificial Sequence
  Synthetic oligonucleotide
  Full comp hsa-miR-3939 MIMAT0018355
gacatcctgtggtctgcgcgta

SEQ ID NO: 5134 - DNA, 22 bp, Artificial Sequence
  Synthetic oligonucleotide
  Full comp hsa-miR-424-5p MIMAT0001341
ttcaaaacatgaattgctgctg

SEQ ID NO: 5135 - DNA, 22 bp, Artificial Sequence
  Synthetic oligonucleotide
  Full comp hsa-miR-6868-5p MIMAT0027636
gctgcttcagtgttctgccagt

SEQ ID NO: 5136 - DNA, 21 bp, Artificial Sequence
  Synthetic oligonucleotide
  Full comp hsa-miR-6502-3p MIMAT0025461
atactctagaaagatggtcta

SEQ ID NO: 5137 - DNA, 22 bp, Artificial Sequence
  Synthetic oligonucleotide
  Full comp hsa-miR-194-5p MIMAT0000460
tccacatggagttgctgttaca

SEQ ID NO: 5138 - DNA, 22 bp, Artificial Sequence
  Synthetic oligonucleotide
  Full comp hsa-miR-3667-3p MIMAT0018090
aaagacccatggagaggaaggt

SEQ ID NO: 5139 - DNA, 19 bp, Artificial Sequence
  Synthetic oligonucleotide
  Full comp hsa-miR-1322 MIMAT0005953
cagcatcagcagcatcatc

SEQ ID NO: 5140 - DNA, 22 bp, Artificial Sequence
  Synthetic oligonucleotide
  Full comp hsa-miR-6842-3p MIMAT0027587
ctgcggagcagagaccagccaa

SEQ ID NO: 5141 - DNA, 21 bp, Artificial Sequence
  Synthetic oligonucleotide
  Full comp hsa-miR-5189-3p MIMAT0027088
tctgggctctgacggttggca

SEQ ID NO: 5142 - DNA, 23 bp, Artificial Sequence
  Synthetic oligonucleotide
  Full comp hsa-miR-4742-3p MIMAT0019873
ctgcaggcaaaggagaatacaga

SEQ ID NO: 5143 - DNA, 21 bp, Artificial Sequence
  Synthetic oligonucleotide
  Full comp hsa-miR-4495 MIMAT0019030
agcaaaaagcctgtttacatt

SEQ ID NO: 5144 - DNA, 22 bp, Artificial Sequence
  Synthetic oligonucleotide
  Full comp hsa-miR-548bb-5p MIMAT0035703
ggcaaaaaccatagttactttt

SEQ ID NO: 5145 - DNA, 26 bp, Artificial Sequence
  Synthetic oligonucleotide
  Full comp hsa-miR-4518 MIMAT0019055
tctcagcacagttatcatccctgagc

SEQ ID NO: 5146 - DNA, 20 bp, Artificial Sequence
  Synthetic oligonucleotide
  Full comp hsa-miR-609 MIMAT0003277
agagatgagagaaacaccct

SEQ ID NO: 5147 - DNA, 20 bp, Artificial Sequence
  Synthetic oligonucleotide
  Full comp hsa-miR-548aw MIMAT0022471
aaccgtgatgacttttgcac

SEQ ID NO: 5148 - DNA, 24 bp, Artificial Sequence
  Synthetic oligonucleotide
  Full comp hsa-miR-3609 MIMAT0017986
cagccagtattactcatcactttg

SEQ ID NO: 5149 - DNA, 23 bp, Artificial Sequence
  Synthetic oligonucleotide
  Full comp hsa-miR-3944-3p MIMAT0018360
ccggagcagcaggccagcccgaa

SEQ ID NO: 5150 - DNA, 21 bp, Artificial Sequence
  Synthetic oligonucleotide
  Full comp hsa-miR-7110-5p MIMAT0028117
ctctctctccccacaccccca

SEQ ID NO: 5151 - DNA, 18 bp, Artificial Sequence
  Synthetic oligonucleotide
  Full comp hsa-miR-7975 MIMAT0031178
tggtgccgtgactaggat

SEQ ID NO: 5152 - DNA, 22 bp, Artificial Sequence
  Synthetic oligonucleotide
  Full comp hsa-miR-548a-3p MIMAT0003251
gcaaaagtaattgccagttttg

SEQ ID NO: 5153 - DNA, 18 bp, Artificial Sequence
  Synthetic oligonucleotide
  Full comp hsa-miR-6126 MIMAT0024599
tctccgccgggccttcac

SEQ ID NO: 5154 - DNA, 22 bp, Artificial Sequence
  Synthetic oligonucleotide
  Full comp hsa-miR-4440 MIMAT0018958
caagccagcaagccccacgaca

SEQ ID NO: 5155 - DNA, 23 bp, Artificial Sequence
  Synthetic oligonucleotide
  Full comp hsa-miR-1255a MIMAT0005906
aatctactttctttgctcatcct

SEQ ID NO: 5156 - DNA, 21 bp, Artificial Sequence
  Synthetic oligonucleotide
  Full comp hsa-miR-378h MIMAT0018984
ccatctgacaccaagtccagt

SEQ ID NO: 5157 - DNA, 19 bp, Artificial Sequence
  Synthetic oligonucleotide
  Full comp hsa-miR-7976 MIMAT0031179
gagcaaaagtctcagggca

SEQ ID NO: 5158 - DNA, 22 bp, Artificial Sequence
  Synthetic oligonucleotide
  Full comp hsa-miR-1468-3p MIMAT0026638
ttttccatttgcttattttgct

SEQ ID NO: 5159 - DNA, 22 bp, Artificial Sequence
  Synthetic oligonucleotide
  Full comp hsa-miR-4719 MIMAT0019832
cctgcatattatagatttgtga

SEQ ID NO: 5160 - DNA, 21 bp, Artificial Sequence
  Synthetic oligonucleotide
  Full comp hsa-miR-4727-5p MIMAT0019847
ccactgtggaagctggcagat

SEQ ID NO: 5161 - DNA, 20 bp, Artificial Sequence
  Synthetic oligonucleotide
  Full comp hsa-miR-620 MIMAT0003289
atttctatatctatctccat

SEQ ID NO: 5162 - DNA, 22 bp, Artificial Sequence
  Synthetic oligonucleotide
  Full comp hsa-miR-451b MIMAT0019840
aatggtaatggttctcttgcta

SEQ ID NO: 5163 - DNA, 20 bp, Artificial Sequence
  Synthetic oligonucleotide
  Full comp hsa-miR-6832-3p MIMAT0027565
ctgggaaagagaaaaagggt

SEQ ID NO: 5164 - DNA, 23 bp, Artificial Sequence
  Synthetic oligonucleotide
  Full comp hsa-miR-4660 MIMAT0019728
ctccattttccaccagagctgca

SEQ ID NO: 5165 - DNA, 22 bp, Artificial Sequence
  Synthetic oligonucleotide
  Full comp hsa-miR-619-5p MIMAT0026622
ggctcatgcctgtaatcccagc

SEQ ID NO: 5166 - DNA, 20 bp, Artificial Sequence
  Synthetic oligonucleotide
  Full comp hsa-miR-6838-3p MIMAT0027579
ctgcaacagaagcaggactt

SEQ ID NO: 5167 - DNA, 19 bp, Artificial Sequence
  Synthetic oligonucleotide
  Full comp hsa-miR-6127 MIMAT0024610
cctcccacccactccctca

SEQ ID NO: 5168 - DNA, 22 bp, Artificial Sequence
  Synthetic oligonucleotide
  Full comp hsa-miR-597-5p MIMAT0003265
acagtggtcatcgagtgacaca

SEQ ID NO: 5169 - DNA, 22 bp, Artificial Sequence
  Synthetic oligonucleotide
  Full comp hsa-miR-550a-3p MIMAT0003257
atgtgcctgagggagtaagaca

SEQ ID NO: 5170 - DNA, 22 bp, Artificial Sequence
  Synthetic oligonucleotide
  Full comp hsa-miR-3144-3p MIMAT0015015
taaagagaccgaacaggtatat

SEQ ID NO: 5171 - DNA, 22 bp, Artificial Sequence
  Synthetic oligonucleotide
  Full comp hsa-let-7e-5p MIMAT0000066
aactatacaacctcctacctca

SEQ ID NO: 5172 - DNA, 22 bp, Artificial Sequence
  Synthetic oligonucleotide
  Full comp hsa-miR-3127-3p MIMAT0019201
ccagcaggcctgcagaagggga

SEQ ID NO: 5173 - DNA, 22 bp, Artificial Sequence
  Synthetic oligonucleotide
  Full comp hsa-miR-4510 MIMAT0019047
aaccatacatcctactccctca

SEQ ID NO: 5174 - DNA, 20 bp, Artificial Sequence
  Synthetic oligonucleotide
  Full comp hsa-miR-4301 MIMAT0016850
tcacaagtgaagtagtggga

SEQ ID NO: 5175 - DNA, 21 bp, Artificial Sequence
  Synthetic oligonucleotide
  Full comp hsa-miR-4708-5p MIMAT0019809
aaggagcaaggcggcatctct

SEQ ID NO: 5176 - DNA, 21 bp, Artificial Sequence
  Synthetic oligonucleotide
  Full comp hsa-miR-8088 MIMAT0031015
tacccctttccagtaccgagg

SEQ ID NO: 5177 - DNA, 17 bp, Artificial Sequence
  Synthetic oligonucleotide
  Full comp hsa-miR-1227-5p MIMAT0022941
ccaccgcctggccccac

SEQ ID NO: 5178 - DNA, 24 bp, Artificial Sequence
  Synthetic oligonucleotide
  Full comp hsa-miR-5189-5p MIMAT0021120
cctgtccatccgcctgtgcccaga

SEQ ID NO: 5179 - DNA, 22 bp, Artificial Sequence
  Synthetic oligonucleotide
  Full comp hsa-let-7f-1-3p MIMAT0004486
gggaaggcaatagattgtatag

SEQ ID NO: 5180 - DNA, 22 bp, Artificial Sequence
  Synthetic oligonucleotide
  Full comp hsa-miR-8063 MIMAT0030990
aagccccgactcctgattttga

SEQ ID NO: 5181 - DNA, 20 bp, Artificial Sequence
  Synthetic oligonucleotide
  Full comp hsa-miR-760 MIMAT0004957
tccccacagacccagagccg

SEQ ID NO: 5182 - DNA, 21 bp, Artificial Sequence
  Synthetic oligonucleotide
  Full comp hsa-miR-583 MIMAT0003248
gtaatgggaccttcctctttg

SEQ ID NO: 5183 - DNA, 22 bp, Artificial Sequence
  Synthetic oligonucleotide
  Full comp hsa-let-7c-3p MIMAT0026472
ggaaagctagaaggttgtacag

SEQ ID NO: 5184 - DNA, 23 bp, Artificial Sequence
  Synthetic oligonucleotide
  Full comp hsa-miR-611 MIMAT0003279
gtcagaccccgaggggtcctcgc

SEQ ID NO: 5185 - DNA, 23 bp, Artificial Sequence
  Synthetic oligonucleotide
  Full comp hsa-miR-203b-3p MIMAT0019814
tccagtggttcttaacagttcaa

SEQ ID NO: 5186 - DNA, 22 bp, Artificial Sequence
  Synthetic oligonucleotide
  Full comp hsa-miR-1296-3p MIMAT0026637
ggttagggtcgaagccccactc

SEQ ID NO: 5187 - DNA, 23 bp, Artificial Sequence
  Synthetic oligonucleotide
  Full comp hsa-miR-4724-5p MIMAT0019841
cgaagctcactcctggttcagtt

SEQ ID NO: 5188 - DNA, 23 bp, Artificial Sequence
  Synthetic oligonucleotide
  Full comp hsa-miR-4703-5p MIMAT0019801
actatatttgtactgtattgcta

SEQ ID NO: 5189 - DNA, 26 bp, Artificial Sequence
  Synthetic oligonucleotide
  Full comp hsa-miR-4700-3p MIMAT0019797
cactggggtgaggagtcagtcctgtg

SEQ ID NO: 5190 - DNA, 19 bp, Artificial Sequence
  Synthetic oligonucleotide
  Full comp hsa-miR-4287 MIMAT0016917
aaagtgccctcaagggaga

SEQ ID NO: 5191 - DNA, 21 bp, Artificial Sequence
  Synthetic oligonucleotide
  Full comp hsa-miR-6843-3p MIMAT0027588
ctgcagagaacaggagaccat

SEQ ID NO: 5192 - DNA, 23 bp, Artificial Sequence
  Synthetic oligonucleotide
  Full comp hsa-miR-3929 MIMAT0018206
agtggtctactcacatcagcctc

SEQ ID NO: 5193 - DNA, 21 bp, Artificial Sequence
  Synthetic oligonucleotide
  Full comp hsa-miR-631 MIMAT0003300
gctgaggtctgggccaggtct

SEQ ID NO: 5194 - DNA, 21 bp, Artificial Sequence
  Synthetic oligonucleotide
  Full comp hsa-miR-7846-3p MIMAT0030421
ccttctctccaggctccgctg

SEQ ID NO: 5195 - DNA, 23 bp, Artificial Sequence
  Synthetic oligonucleotide
  Full comp hsa-miR-3921 MIMAT0018196
acaaggcatatggtactcagaga

SEQ ID NO: 5196 - DNA, 22 bp, Artificial Sequence
  Synthetic oligonucleotide
  Full comp hsa-miR-6737-3p MIMAT0027376
ctgggtaggggtgaagcacaga

SEQ ID NO: 5197 - DNA, 22 bp, Artificial Sequence
  Synthetic oligonucleotide
  Full comp hsa-miR-125b-1-3p MIMAT0004592
agctcccaagagcctaacccgt

SEQ ID NO: 5198 - DNA, 22 bp, Artificial Sequence
  Synthetic oligonucleotide
  Full comp hsa-miR-4774-5p MIMAT0019929
ttattacctactacataccaga

SEQ ID NO: 5199 - DNA, 22 bp, Artificial Sequence
  Synthetic oligonucleotide
  Full comp hsa-miR-4435 MIMAT0018951
cctctgtgtgagctctggccat

SEQ ID NO: 5200 - DNA, 21 bp, Artificial Sequence
  Synthetic oligonucleotide
  Full comp hsa-miR-6798-3p MIMAT0027497
ctacagggggatggggggtag

SEQ ID NO: 5201 - DNA, 16 bp, Artificial Sequence
  Synthetic oligonucleotide
  Full comp hsa-miR-4266 MIMAT0016892
ggccaaggcctcctag

SEQ ID NO: 5202 - DNA, 21 bp, Artificial Sequence
  Synthetic oligonucleotide
  Full comp hsa-miR-1910-5p MIMAT0007884
aggcggcaggcacaggactgg

SEQ ID NO: 5203 - DNA, 22 bp, Artificial Sequence
  Synthetic oligonucleotide
  Full comp hsa-miR-4769-3p MIMAT0019923
gtaggggagggaggatggcaga

SEQ ID NO: 5204 - DNA, 22 bp, Artificial Sequence
  Synthetic oligonucleotide
  Full comp hsa-miR-548ab MIMAT0018928
agcaaaatccacaattactttt

SEQ ID NO: 5205 - DNA, 22 bp, Artificial Sequence
  Synthetic oligonucleotide
  Full comp hsa-miR-181a-3p MIMAT0000270
ggtacaatcaacggtcgatggt

SEQ ID NO: 5206 - DNA, 24 bp, Artificial Sequence
  Synthetic oligonucleotide
  Full comp hsa-miR-664a-5p MIMAT0005948
atccaatcattttccctagccagt

SEQ ID NO: 5207 - DNA, 23 bp, Artificial Sequence
  Synthetic oligonucleotide
  Full comp hsa-miR-466 MIMAT0015002
atgtgtgttgcgtgtatgtgtat

SEQ ID NO: 5208 - DNA, 16 bp, Artificial Sequence
  Synthetic oligonucleotide
  Full comp hsa-miR-4279 MIMAT0016909
gaagccgggaggagag

SEQ ID NO: 5209 - DNA, 23 bp, Artificial Sequence
  Synthetic oligonucleotide
  Full comp hsa-miR-219b-3p MIMAT0019748
actgattgtccaaacgcaattct

SEQ ID NO: 5210 - DNA, 22 bp, Artificial Sequence
  Synthetic oligonucleotide
  Full comp hsa-miR-4425 MIMAT0018940
atggtcctgctgaatcccaaca

SEQ ID NO: 5211 - DNA, 22 bp, Artificial Sequence
  Synthetic oligonucleotide
  Full comp hsa-miR-16-2-3p MIMAT0004518
taaagcagcacagtaatattgg

SEQ ID NO: 5212 - DNA, 22 bp, Artificial Sequence
  Synthetic oligonucleotide
  Full comp hsa-miR-320a MIMAT0000510
tcgccctctcaacccagctttt

SEQ ID NO: 5213 - DNA, 22 bp, Artificial Sequence
  Synthetic oligonucleotide
  Full comp hsa-miR-7843-3p MIMAT0030412
cgtaaggcagagaaggcttcat

SEQ ID NO: 5214 - DNA, 22 bp, Artificial Sequence
  Synthetic oligonucleotide
  Full comp hsa-miR-1225-5p MIMAT0005572
ccccccactgggccgtacccac

SEQ ID NO: 5215 - DNA, 17 bp, Artificial Sequence
  Synthetic oligonucleotide
  Full comp hsa-miR-4288 MIMAT0016918
ggaaactcagcagacaa

SEQ ID NO: 5216 - DNA, 23 bp, Artificial Sequence
  Synthetic oligonucleotide
  Full comp hsa-miR-181a-5p MIMAT0000256
actcaccgacagcgttgaatgtt

SEQ ID NO: 5217 - DNA, 22 bp, Artificial Sequence
  Synthetic oligonucleotide
  Full comp hsa-miR-4662a-3p MIMAT0019732
atttagccaattgtctatcttt

SEQ ID NO: 5218 - DNA, 21 bp, Artificial Sequence
  Synthetic oligonucleotide
  Full comp hsa-miR-4766-3p MIMAT0019918
ttccaaaagagcaattgctat

SEQ ID NO: 5219 - DNA, 22 bp, Artificial Sequence
  Synthetic oligonucleotide
  Full comp hsa-miR-1245b-3p MIMAT0019951
tataggcctttagatcatctga

SEQ ID NO: 5220 - DNA, 21 bp, Artificial Sequence
  Synthetic oligonucleotide
  Full comp hsa-miR-6749-3p MIMAT0027399
ctgggccaggcaggggaggag

SEQ ID NO: 5221 - DNA, 18 bp, Artificial Sequence
  Synthetic oligonucleotide
  Full comp hsa-miR-1827 MIMAT0006767
attcaatctactgcctca

SEQ ID NO: 5222 - DNA, 22 bp, Artificial Sequence
  Synthetic oligonucleotide
  Full comp hsa-miR-5695 MIMAT0022488
ctgtctagattcttcttggagt

SEQ ID NO: 5223 - DNA, 22 bp, Artificial Sequence
  Synthetic oligonucleotide
  Full comp hsa-miR-1299 MIMAT0005887
tccctcacacagaattccagaa

SEQ ID NO: 5224 - DNA, 22 bp, Artificial Sequence
  Synthetic oligonucleotide
  Full comp hsa-miR-374c-3p MIMAT0022735
atataatacaacctgctaagtg

SEQ ID NO: 5225 - DNA, 20 bp, Artificial Sequence
  Synthetic oligonucleotide
  Full comp hsa-miR-4701-3p MIMAT0019799
acaccacacccatcacccat

SEQ ID NO: 5226 - DNA, 19 bp, Artificial Sequence
  Synthetic oligonucleotide
  Full comp hsa-miR-7162-3p MIMAT0028235
gctgctgttccacctcaga

SEQ ID NO: 5227 - DNA, 19 bp, Artificial Sequence
  Synthetic oligonucleotide
  Full comp hsa-miR-6131 MIMAT0024615
cactcccatctgaccagcc

SEQ ID NO: 5228 - DNA, 21 bp, Artificial Sequence
  Synthetic oligonucleotide
  Full comp hsa-miR-6845-3p MIMAT0027591
ctggggcacagggaggagagg

SEQ ID NO: 5229 - DNA, 22 bp, Artificial Sequence
  Synthetic oligonucleotide
  Full comp hsa-miR-320b MIMAT0005792
ttgccctctcaacccagctttt

SEQ ID NO: 5230 - DNA, 22 bp, Artificial Sequence
  Synthetic oligonucleotide
  Full comp hsa-miR-505-5p MIMAT0004776
acatcaatacttcctggctccc

SEQ ID NO: 5231 - DNA, 22 bp, Artificial Sequence
  Synthetic oligonucleotide
  Full comp hsa-miR-4729 MIMAT0019851
tagcttcccaacagataaatga

SEQ ID NO: 5232 - DNA, 21 bp, Artificial Sequence
  Synthetic oligonucleotide
  Full comp hsa-miR-6781-5p MIMAT0027462
acgcccttgacctccggcccg

SEQ ID NO: 5233 - DNA, 20 bp, Artificial Sequence
  Synthetic oligonucleotide
  Full comp hsa-miR-6822-5p MIMAT0027544
aagccccaactggttccctg

SEQ ID NO: 5234 - DNA, 21 bp, Artificial Sequence
  Synthetic oligonucleotide
  Full comp hsa-miR-192-5p MIMAT0000222
ggctgtcaattcataggtcag

SEQ ID NO: 5235 - DNA, 22 bp, Artificial Sequence
  Synthetic oligonucleotide
  Full comp hsa-miR-3664-5p MIMAT0018086
actcatgagtgaagacagagtt

SEQ ID NO: 5236 - DNA, 22 bp, Artificial Sequence
  Synthetic oligonucleotide
  Full comp hsa-miR-548l MIMAT0005889
gacaaaacccgcaaatactttt

SEQ ID NO: 5237 - DNA, 23 bp, Artificial Sequence
  Synthetic oligonucleotide
  Full comp hsa-miR-6830-3p MIMAT0027561
ctgcaagggagagaagaaagaca

SEQ ID NO: 5238 - DNA, 22 bp, Artificial Sequence
  Synthetic oligonucleotide
  Full comp hsa-miR-1283 MIMAT0005799
agaaagcgctttcctttgtaga

SEQ ID NO: 5239 - DNA, 21 bp, Artificial Sequence
  Synthetic oligonucleotide
  Full comp hsa-miR-6729-3p MIMAT0027360
ctgagagggcgagggggatga

SEQ ID NO: 5240 - DNA, 21 bp, Artificial Sequence
  Synthetic oligonucleotide
  Full comp hsa-miR-5006-3p MIMAT0021034
ctgccaggatggaaagggaaa

SEQ ID NO: 5241 - DNA, 22 bp, Artificial Sequence
  Synthetic oligonucleotide
  Full comp hsa-miR-5689 MIMAT0022481
tctaggactacaggtgtatgct

SEQ ID NO: 5242 - DNA, 22 bp, Artificial Sequence
  Synthetic oligonucleotide
  Full comp hsa-miR-130b-3p MIMAT0000691
atgccctttcatcattgcactg

SEQ ID NO: 5243 - DNA, 23 bp, Artificial Sequence
  Synthetic oligonucleotide
  Full comp hsa-miR-412-3p MIMAT0002170
acggctagtggaccaggtgaagt

SEQ ID NO: 5244 - DNA, 23 bp, Artificial Sequence
  Synthetic oligonucleotide
  Full comp hsa-miR-548z MIMAT0018446
tgcaaaagtaattgcggtttttg

SEQ ID NO: 5245 - DNA, 22 bp, Artificial Sequence
  Synthetic oligonucleotide
  Full comp hsa-let-7c-5p MIMAT0000064
aaccatacaacctactacctca

SEQ ID NO: 5246 - DNA, 22 bp, Artificial Sequence
  Synthetic oligonucleotide
  Full comp hsa-miR-203a-3p MIMAT0000264
ctagtggtcctaaacatttcac

SEQ ID NO: 5247 - DNA, 22 bp, Artificial Sequence
  Synthetic oligonucleotide
  Full comp hsa-miR-377-3p MIMAT0000730
acaaaagttgcctttgtgtgat

SEQ ID NO: 5248 - DNA, 22 bp, Artificial Sequence
  Synthetic oligonucleotide
  Full comp hsa-miR-6783-3p MIMAT0027467
ctacagaggagaagcccaggaa

SEQ ID NO: 5249 - DNA, 17 bp, Artificial Sequence
  Synthetic oligonucleotide
  Full comp hsa-miR-4319 MIMAT0016870
gtggctttgctcaggga

SEQ ID NO: 5250 - DNA, 22 bp, Artificial Sequence
  Synthetic oligonucleotide
  Full comp hsa-miR-6841-5p MIMAT0027584
acaacttgctctgagtacccta

SEQ ID NO: 5251 - DNA, 22 bp, Artificial Sequence
  Synthetic oligonucleotide
  Full comp hsa-miR-374c-5p MIMAT0018443
agcacttagcaggttgtattat

SEQ ID NO: 5252 - DNA, 22 bp, Artificial Sequence
  Synthetic oligonucleotide
  Full comp hsa-miR-199b-3p MIMAT0004563
taaccaatgtgcagactactgt

SEQ ID NO: 5253 - DNA, 19 bp, Artificial Sequence
  Synthetic oligonucleotide
  Full comp hsa-miR-6165 MIMAT0024782
ctcccctcacctcctgctg

SEQ ID NO: 5254 - DNA, 23 bp, Artificial Sequence
  Synthetic oligonucleotide
  Full comp hsa-miR-454-3p MIMAT0003885
accctataagcaatattgcacta

SEQ ID NO: 5255 - DNA, 20 bp, Artificial Sequence
  Synthetic oligonucleotide
  Full comp hsa-miR-4639-3p MIMAT0019698
gcaaagcaaggtgagagtga

SEQ ID NO: 5256 - DNA, 22 bp, Artificial Sequence
  Synthetic oligonucleotide
  Full comp hsa-miR-1278 MIMAT0005936
atagatgatatgcacagtacta

SEQ ID NO: 5257 - DNA, 23 bp, Artificial Sequence
  Synthetic oligonucleotide
  Full comp hsa-miR-6865-5p MIMAT0027630
tgaagtccctcctctgccaccta

SEQ ID NO: 5258 - DNA, 22 bp, Artificial Sequence
  Synthetic oligonucleotide
  Full comp hsa-miR-5699-3p MIMAT0022492
gctccaacaaggaaagacagga

SEQ ID NO: 5259 - DNA, 22 bp, Artificial Sequence
  Synthetic oligonucleotide
  Full comp hsa-miR-6746-3p MIMAT0027393
ctgtggagacaggcggcggctg

SEQ ID NO: 5260 - DNA, 22 bp, Artificial Sequence
  Synthetic oligonucleotide
  Full comp hsa-miR-6720-3p MIMAT0025851
tctaccagttcctgcaggcgcg

SEQ ID NO: 5261 - DNA, 23 bp, Artificial Sequence
  Synthetic oligonucleotide
  Full comp hsa-miR-874-5p MIMAT0026718
tcttaccctggtgcgtggggccg

SEQ ID NO: 5262 - DNA, 21 bp, Artificial Sequence
  Synthetic oligonucleotide
  Full comp hsa-miR-6505-3p MIMAT0025467
ctttggaagaggtagaagtca

SEQ ID NO: 5263 - DNA, 23 bp, Artificial Sequence
  Synthetic oligonucleotide
  Full comp hsa-miR-6849-5p MIMAT0027598
tccacacactcccctatccactc

SEQ ID NO: 5264 - DNA, 19 bp, Artificial Sequence
  Synthetic oligonucleotide
  Full comp hsa-miR-1973 MIMAT0009448
tatgctacctttgcacggt

SEQ ID NO: 5265 - DNA, 22 bp, Artificial Sequence
  Synthetic oligonucleotide
  Full comp hsa-miR-4473 MIMAT0019000
tacttgtaacggagagcactag

SEQ ID NO: 5266 - DNA, 21 bp, Artificial Sequence
  Synthetic oligonucleotide
  Full comp hsa-miR-6786-5p MIMAT0027472
acgcccctccggccccaccgc

SEQ ID NO: 5267 - DNA, 22 bp, Artificial Sequence
  Synthetic oligonucleotide
  Full comp hsa-miR-888-3p MIMAT0004917
ttcacccaaagaggtgtcagtc

SEQ ID NO: 5268 - DNA, 22 bp, Artificial Sequence
  Synthetic oligonucleotide
  Full comp hsa-miR-3129-3p MIMAT0019202
gcagcagtgtagagattagttt

SEQ ID NO: 5269 - DNA, 23 bp, Artificial Sequence
  Synthetic oligonucleotide
  Full comp hsa-miR-6866-5p MIMAT0027632
agaatctctattccagcctctaa

SEQ ID NO: 5270 - DNA, 20 bp, Artificial Sequence
  Synthetic oligonucleotide
  Full comp hsa-miR-6888-5p MIMAT0027676
atctgcctgagcatctcctt

SEQ ID NO: 5271 - DNA, 23 bp, Artificial Sequence
  Synthetic oligonucleotide
  Full comp hsa-miR-107 MIMAT0000104
tgatagccctgtacaatgctgct

SEQ ID NO: 5272 - DNA, 23 bp, Artificial Sequence
  Synthetic oligonucleotide
  Full comp hsa-miR-5003-5p MIMAT0021025
tctaccctgcaaggttgttgtga

SEQ ID NO: 5273 - DNA, 21 bp, Artificial Sequence
  Synthetic oligonucleotide
  Full comp hsa-miR-4804-5p MIMAT0019984
ttgcttaaccttaccgtccaa

SEQ ID NO: 5274 - DNA, 22 bp, Artificial Sequence
  Synthetic oligonucleotide
  Full comp hsa-miR-300 MIMAT0004903
agagagagtctgcccttgtata

SEQ ID NO: 5275 - DNA, 21 bp, Artificial Sequence
  Synthetic oligonucleotide
  Full comp hsa-miR-6507-5p MIMAT0025470
acaaagtccctcctattcttc

SEQ ID NO: 5276 - DNA, 20 bp, Artificial Sequence
  Synthetic oligonucleotide
  Full comp hsa-miR-3678-5p MIMAT0018102
cacagcagagtttgtacgga

SEQ ID NO: 5277 - DNA, 23 bp, Artificial Sequence
  Synthetic oligonucleotide
  Full comp hsa-miR-6873-3p MIMAT0027647
ctgagagagaaagacagagagaa

SEQ ID NO: 5278 - DNA, 22 bp, Artificial Sequence
  Synthetic oligonucleotide
  Full comp hsa-miR-4733-3p MIMAT0019858
atcccaatgctagacctggtgg

SEQ ID NO: 5279 - DNA, 21 bp, Artificial Sequence
  Synthetic oligonucleotide
  Full comp hsa-miR-3156-3p MIMAT0019209
agaaagatctggaagtgggag

SEQ ID NO: 5280 - DNA, 22 bp, Artificial Sequence
  Synthetic oligonucleotide
  Full comp hsa-miR-4775 MIMAT0019931
agtgaccgaaacaaaaaattaa

SEQ ID NO: 5281 - DNA, 21 bp, Artificial Sequence
  Synthetic oligonucleotide
  Full comp hsa-miR-4671-3p MIMAT0019753
agaccaaagactatgcactaa

SEQ ID NO: 5282 - DNA, 23 bp, Artificial Sequence
  Synthetic oligonucleotide
  Full comp hsa-miR-4658 MIMAT0019725
attcctccaggatccacactcac

SEQ ID NO: 5283 - DNA, 21 bp, Artificial Sequence
  Synthetic oligonucleotide
  Full comp hsa-miR-7845-5p MIMAT0030420
ccacgaccctccctgtccctt

SEQ ID NO: 5284 - DNA, 22 bp, Artificial Sequence
  Synthetic oligonucleotide
  Full comp hsa-miR-933 MIMAT0004976
gggagaggtctccctgcgcaca

SEQ ID NO: 5285 - DNA, 23 bp, Artificial Sequence
  Synthetic oligonucleotide
  Full comp hsa-miR-518c-3p MIMAT0002848
acactctaaagagaagcgctttg

SEQ ID NO: 5286 - DNA, 22 bp, Artificial Sequence
  Synthetic oligonucleotide
  Full comp hsa-miR-3940-3p MIMAT0018356
aagtgggctgggatccgggctg

SEQ ID NO: 5287 - DNA, 21 bp, Artificial Sequence
  Synthetic oligonucleotide
  Full comp hsa-miR-4666a-3p MIMAT0019742
aaatacatgtcagattgtatg

SEQ ID NO: 5288 - DNA, 22 bp, Artificial Sequence
  Synthetic oligonucleotide
  Full comp hsa-miR-218-2-3p MIMAT0004566
cgcggtgcttgacagaaccatg

SEQ ID NO: 5289 - DNA, 20 bp, Artificial Sequence
  Synthetic oligonucleotide
  Full comp hsa-miR-6742-3p MIMAT0027386
ctagaggggacaacccaggt

SEQ ID NO: 5290 - DNA, 23 bp, Artificial Sequence
  Synthetic oligonucleotide
  Full comp hsa-miR-513c-3p MIMAT0022728
tcttctcagaaaggtgaaattta

SEQ ID NO: 5291 - DNA, 22 bp, Artificial Sequence
  Synthetic oligonucleotide
  Full comp hsa-miR-519b-5p MIMAT0005454
cagaaagcgcttccctctagag

SEQ ID NO: 5292 - DNA, 23 bp, Artificial Sequence
  Synthetic oligonucleotide
  Full comp hsa-miR-212-5p MIMAT0022695
agtaagcagtctagagccaaggt

SEQ ID NO: 5293 - DNA, 21 bp, Artificial Sequence
  Synthetic oligonucleotide
  Full comp hsa-miR-6796-3p MIMAT0027493
ctgcggggaggggagagcttc

SEQ ID NO: 5294 - DNA, 21 bp, Artificial Sequence
  Synthetic oligonucleotide
  Full comp hsa-miR-889-3p MIMAT0004921
acaatggttgtccgatattaa

SEQ ID NO: 5295 - DNA, 23 bp, Artificial Sequence
  Synthetic oligonucleotide
  Full comp hsa-miR-2054 MIMAT0009979
aataaattaaatttatattacag

SEQ ID NO: 5296 - DNA, 23 bp, Artificial Sequence
  Synthetic oligonucleotide
  Full comp hsa-miR-6732-3p MIMAT0027366
ctgggagggagaggacagggtta

SEQ ID NO: 5297 - DNA, 22 bp, Artificial Sequence
  Synthetic oligonucleotide
  Full comp hsa-miR-15a-3p MIMAT0004488
tgaggcagcacaatatggcctg

SEQ ID NO: 5298 - DNA, 23 bp, Artificial Sequence
  Synthetic oligonucleotide
  Full comp hsa-miR-6790-5p MIMAT0027480
aaccccgccaaatccacactcac

SEQ ID NO: 5299 - DNA, 23 bp, Artificial Sequence
  Synthetic oligonucleotide
  Full comp hsa-miR-3614-3p MIMAT0017993
aaaacaccaagatctgaaggcta

SEQ ID NO: 5300 - DNA, 23 bp, Artificial Sequence
  Synthetic oligonucleotide
  Full comp hsa-miR-574-5p MIMAT0004795
acacactcacacacacacactca

SEQ ID NO: 5301 - DNA, 22 bp, Artificial Sequence
  Synthetic oligonucleotide
  Full comp hsa-miR-33a-3p MIMAT0004506
gtgatgcactgtggaaacattg

SEQ ID NO: 5302 - DNA, 21 bp, Artificial Sequence
  Synthetic oligonucleotide
  Full comp hsa-miR-1909-5p MIMAT0007882
cagggcaggcaccggcactca

SEQ ID NO: 5303 - DNA, 22 bp, Artificial Sequence
  Synthetic oligonucleotide
  Full comp hsa-miR-548g-3p MIMAT0005912
gtacaaaagtaattacagtttt

SEQ ID NO: 5304 - DNA, 26 bp, Artificial Sequence
  Synthetic oligonucleotide
  Full comp hsa-miR-1226-5p MIMAT0005576
ccccatccaggcctgcatgccctcac

SEQ ID NO: 5305 - DNA, 23 bp, Artificial Sequence
  Synthetic oligonucleotide
  Full comp hsa-miR-4461 MIMAT0018983
gcctagccctactagtctcaatc

SEQ ID NO: 5306 - DNA, 22 bp, Artificial Sequence
  Synthetic oligonucleotide
  Full comp hsa-miR-5580-3p MIMAT0022274
gtgctggctcacttcatatgtg

SEQ ID NO: 5307 - DNA, 23 bp, Artificial Sequence
  Synthetic oligonucleotide
  Full comp hsa-miR-4657 MIMAT0019724
atgcctcagaccacttccacatt

SEQ ID NO: 5308 - DNA, 20 bp, Artificial Sequence
  Synthetic oligonucleotide
  Full comp hsa-miR-3610 MIMAT0017987
cggcgcctcctttccgattc

SEQ ID NO: 5309 - DNA, 23 bp, Artificial Sequence
  Synthetic oligonucleotide
  Full comp hsa-miR-4767 MIMAT0019919
ggcggcggccaggagcgcccgcg

SEQ ID NO: 5310 - DNA, 21 bp, Artificial Sequence
  Synthetic oligonucleotide
  Full comp hsa-miR-5095 MIMAT0020600
cgcggtggttcacgcctgtaa

SEQ ID NO: 5311 - DNA, 22 bp, Artificial Sequence
  Synthetic oligonucleotide
  Full comp hsa-miR-296-3p MIMAT0004679
ggagagcctccacccaaccctc

SEQ ID NO: 5312 - DNA, 22 bp, Artificial Sequence
  Synthetic oligonucleotide
  Full comp hsa-miR-655-5p MIMAT0026626
gaacataacacggataacctct

SEQ ID NO: 5313 - DNA, 21 bp, Artificial Sequence
  Synthetic oligonucleotide
  Full comp hsa-miR-7160-5p MIMAT0028230
ggcacagcccggacctcagca

SEQ ID NO: 5314 - DNA, 23 bp, Artificial Sequence
  Synthetic oligonucleotide
  Full comp hsa-miR-6720-5p MIMAT0027345
cgcggcgcctaccagggctggaa

SEQ ID NO: 5315 - DNA, 21 bp, Artificial Sequence
  Synthetic oligonucleotide
  Full comp hsa-miR-4423-3p MIMAT0018936
ttgttgctttttggtgcctat

SEQ ID NO: 5316 - DNA, 21 bp, Artificial Sequence
  Synthetic oligonucleotide
  Full comp hsa-miR-877-3p MIMAT0004950
ctgggaggagggagaagagga

SEQ ID NO: 5317 - DNA, 22 bp, Artificial Sequence
  Synthetic oligonucleotide
  Full comp hsa-miR-519c-5p MIMAT0002831
cagaaagcgcttccctctagag

SEQ ID NO: 5318 - DNA, 21 bp, Artificial Sequence
  Synthetic oligonucleotide
  Full comp hsa-miR-6752-3p MIMAT0027405
ctgggagtatgggggcaggga

SEQ ID NO: 5319 - DNA, 21 bp, Artificial Sequence
  Synthetic oligonucleotide
  Full comp hsa-miR-5008-3p MIMAT0021040
gcgaggccctgggagcacagg

SEQ ID NO: 5320 - DNA, 21 bp, Artificial Sequence
  Synthetic oligonucleotide
  Full comp hsa-miR-27b-3p MIMAT0000419
gcagaacttagccactgtgaa

SEQ ID NO: 5321 - DNA, 22 bp, Artificial Sequence
  Synthetic oligonucleotide
  Full comp hsa-miR-208b-3p MIMAT0004960
acaaaccttttgttcgtcttat

SEQ ID NO: 5322 - DNA, 22 bp, Artificial Sequence
  Synthetic oligonucleotide
  Full comp hsa-miR-487b-5p MIMAT0026614
cgaacaggacagggataaccac

SEQ ID NO: 5323 - DNA, 22 bp, Artificial Sequence
  Synthetic oligonucleotide
  Full comp hsa-miR-649 MIMAT0003319
gactcttgaacaacacaggttt

SEQ ID NO: 5324 - DNA, 20 bp, Artificial Sequence
  Synthetic oligonucleotide
  Full comp hsa-miR-326 MIMAT0000756
ctggaggaagggcccagagg

SEQ ID NO: 5325 - DNA, 21 bp, Artificial Sequence
  Synthetic oligonucleotide
  Full comp hsa-miR-8085 MIMAT0031012
gcctcacagtcctctctccca

SEQ ID NO: 5326 - DNA, 22 bp, Artificial Sequence
  Synthetic oligonucleotide
  Full comp hsa-miR-24-2-5p MIMAT0004497
ctgtgtttcagctcagtaggca

SEQ ID NO: 5327 - DNA, 22 bp, Artificial Sequence
  Synthetic oligonucleotide
  Full comp hsa-miR-1185-1-3p MIMAT0022838
ataagagtctccccctgtatat

SEQ ID NO: 5328 - DNA, 23 bp, Artificial Sequence
  Synthetic oligonucleotide
  Full comp hsa-miR-548g-5p MIMAT0022722
caaaaactgcaattacttttgca

SEQ ID NO: 5329 - DNA, 20 bp, Artificial Sequence
  Synthetic oligonucleotide
  Full comp hsa-miR-6086 MIMAT0023711
ctctgcccttcccaacctcc

SEQ ID NO: 5330 - DNA, 21 bp, Artificial Sequence
  Synthetic oligonucleotide
  Full comp hsa-miR-4800-5p MIMAT0019978
tccttccttcctcggtccact

SEQ ID NO: 5331 - DNA, 21 bp, Artificial Sequence
  Synthetic oligonucleotide
  Full comp hsa-miR-6846-3p MIMAT0027593
ctagggagacagaaggggtca

SEQ ID NO: 5332 - DNA, 24 bp, Artificial Sequence
  Synthetic oligonucleotide
  Full comp hsa-miR-3529-3p MIMAT0022741
tggaagactagtgattttgttgtt

SEQ ID NO: 5333 - DNA, 22 bp, Artificial Sequence
  Synthetic oligonucleotide
  Full comp hsa-miR-4661-5p MIMAT0019729
gtcaggatccacagagctagtt

SEQ ID NO: 5334 - DNA, 22 bp, Artificial Sequence
  Synthetic oligonucleotide
  Full comp hsa-miR-548as-3p MIMAT0022268
acaaacataattgtgggtttta

SEQ ID NO: 5335 - DNA, 24 bp, Artificial Sequence
  Synthetic oligonucleotide
  Full comp hsa-miR-6817-5p MIMAT0027534
ccactccaagcttcctatggcaga

SEQ ID NO: 5336 - DNA, 24 bp, Artificial Sequence
  Synthetic oligonucleotide
  Full comp hsa-miR-6500-5p MIMAT0025454
ggacacctggagtggatagctcct

SEQ ID NO: 5337 - DNA, 22 bp, Artificial Sequence
  Synthetic oligonucleotide
  Full comp hsa-miR-6754-3p MIMAT0027409
tgcaggcagaggcaggtgaaga

SEQ ID NO: 5338 - DNA, 21 bp, Artificial Sequence
  Synthetic oligonucleotide
  Full comp hsa-miR-5591-3p MIMAT0022302
tgggagctaagctatgggtat

SEQ ID NO: 5339 - DNA, 22 bp, Artificial Sequence
  Synthetic oligonucleotide
  Full comp hsa-miR-16-5p MIMAT0000069
cgccaatatttacgtgctgcta

SEQ ID NO: 5340 - DNA, 22 bp, Artificial Sequence
  Synthetic oligonucleotide
  Full comp hsa-miR-3159 MIMAT0015033
gtggccgacacttgtaatccta

SEQ ID NO: 5341 - DNA, 21 bp, Artificial Sequence
  Synthetic oligonucleotide
  Full comp hsa-miR-1302 MIMAT0005890
tttagcataagtatgtcccaa

SEQ ID NO: 5342 - DNA, 19 bp, Artificial Sequence
  Synthetic oligonucleotide
  Full comp hsa-miR-558 MIMAT0003222
attttggtacagcagctca

SEQ ID NO: 5343 - DNA, 21 bp, Artificial Sequence
  Synthetic oligonucleotide
  Full comp hsa-miR-514b-3p MIMAT0015088
tccactcacagaggtgtcaat

SEQ ID NO: 5344 - DNA, 24 bp, Artificial Sequence
  Synthetic oligonucleotide
  Full comp hsa-miR-4723-5p MIMAT0019838
tgctcttatctcatggctccccca

SEQ ID NO: 5345 - DNA, 21 bp, Artificial Sequence
  Synthetic oligonucleotide
  Full comp hsa-miR-4785 MIMAT0019949
gctggcggcgtcgccgactct

SEQ ID NO: 5346 - DNA, 22 bp, Artificial Sequence
  Synthetic oligonucleotide
  Full comp hsa-miR-3671 MIMAT0018094
tgcagactagtccttatttgat

SEQ ID NO: 5347 - DNA, 24 bp, Artificial Sequence
  Synthetic oligonucleotide
  Full comp hsa-miR-7706 MIMAT0030021
tctcggcagagcacaggcgcttca

SEQ ID NO: 5348 - DNA, 22 bp, Artificial Sequence
  Synthetic oligonucleotide
  Full comp hsa-miR-4502 MIMAT0019038
cttcagcaccatcatcatcagc

SEQ ID NO: 5349 - DNA, 17 bp, Artificial Sequence
  Synthetic oligonucleotide
  Full comp hsa-miR-4294 MIMAT0016849
ccctgctgtagactccc

SEQ ID NO: 5350 - DNA, 23 bp, Artificial Sequence
  Synthetic oligonucleotide
  Full comp hsa-miR-512-5p MIMAT0002822
gaaagtgccctcaaggctgagtg

SEQ ID NO: 5351 - DNA, 23 bp, Artificial Sequence
  Synthetic oligonucleotide
  Full comp hsa-miR-191-5p MIMAT0000440
cagctgcttttgggattccgttg

SEQ ID NO: 5352 - DNA, 20 bp, Artificial Sequence
  Synthetic oligonucleotide
  Full comp hsa-miR-1976 MIMAT0009451
acagcaaggagggcaggagg

SEQ ID NO: 5353 - DNA, 22 bp, Artificial Sequence
  Synthetic oligonucleotide
  Mismatch hsa-miR-576-3p MIMAT0004796
gattccaatttccccacatctt

SEQ ID NO: 5354 - DNA, 22 bp, Artificial Sequence
  Synthetic oligonucleotide
  Mismatch hsa-miR-140-5p MIMAT0000431
ctaccatagggctaaaccactg

SEQ ID NO: 5355 - DNA, 22 bp, Artificial Sequence
  Synthetic oligonucleotide
  Mismatch hsa-miR-522-5p MIMAT0005451
cagaaagcgctctcctctagag

SEQ ID NO: 5356 - DNA, 22 bp, Artificial Sequence
  Synthetic oligonucleotide
  Mismatch hsa-miR-1298-5p MIMAT0005800
tacatctggactaccgaatgaa

SEQ ID NO: 5357 - DNA, 22 bp, Artificial Sequence
  Synthetic oligonucleotide
  Mismatch hsa-miR-133a-3p MIMAT0000427
cagctggttgatagggaccaaa

SEQ ID NO: 5358 - DNA, 21 bp, Artificial Sequence
  Synthetic oligonucleotide
  Mismatch hsa-miR-4743-3p MIMAT0022978
ctggaccagattagacagaaa

SEQ ID NO: 5359 - DNA, 23 bp, Artificial Sequence
  Synthetic oligonucleotide
  Mismatch hsa-miR-557 MIMAT0003221
agacaaggcccattcgtgcaaac

SEQ ID NO: 5360 - DNA, 22 bp, Artificial Sequence
  Synthetic oligonucleotide
  Mismatch hsa-miR-548ao-3p MIMAT0021030
tgcaaaagtagctacggtcttt

SEQ ID NO: 5361 - DNA, 24 bp, Artificial Sequence
  Synthetic oligonucleotide
  Mismatch hsa-miR-5088-5p MIMAT0021080
cctccatccaatctttgagccctg

SEQ ID NO: 5362 - DNA, 24 bp, Artificial Sequence
  Synthetic oligonucleotide
  Mismatch hsa-miR-4649-5p MIMAT0019711
ctctgagagcccattcctcgccca

SEQ ID NO: 5363 - DNA, 20 bp, Artificial Sequence
  Synthetic oligonucleotide
  Mismatch hsa-miR-665 MIMAT0004952
aggggcctctacctcctggt

SEQ ID NO: 5364 - DNA, 21 bp, Artificial Sequence
  Synthetic oligonucleotide
  Mismatch hsa-miR-3622b-3p MIMAT0018006
caggcacgggtactcaggtga

SEQ ID NO: 5365 - DNA, 21 bp, Artificial Sequence
  Synthetic oligonucleotide
  Mismatch hsa-miR-4493 MIMAT0019028
acagagatggttaggccttct

SEQ ID NO: 5366 - DNA, 21 bp, Artificial Sequence
  Synthetic oligonucleotide
  Mismatch hsa-miR-1250-5p MIMAT0005902
aaaggccacactcagcaccgt

SEQ ID NO: 5367 - DNA, 22 bp, Artificial Sequence
  Synthetic oligonucleotide
  Mismatch hsa-miR-3622a-5p MIMAT0018003
ctcacctgagcctccgtgcctg

SEQ ID NO: 5368 - DNA, 22 bp, Artificial Sequence
  Synthetic oligonucleotide
  Mismatch hsa-miR-381-3p MIMAT0000736
acagagagcttatccttgtata

SEQ ID NO: 5369 - DNA, 23 bp, Artificial Sequence
  Synthetic oligonucleotide
  Mismatch hsa-miR-4709-3p MIMAT0019812
gctacagagcactccctcttcaa

SEQ ID NO: 5370 - DNA, 21 bp, Artificial Sequence
  Synthetic oligonucleotide
  Mismatch hsa-miR-7159-5p MIMAT0028228
ccatcctacattcttgttgaa

SEQ ID NO: 5371 - DNA, 23 bp, Artificial Sequence
  Synthetic oligonucleotide
  Mismatch hsa-miR-6738-5p MIMAT0027377
cccctgtgctctcttacccctcg

SEQ ID NO: 5372 - DNA, 22 bp, Artificial Sequence
  Synthetic oligonucleotide
  Mismatch hsa-miR-374b-3p MIMAT0004956
aatgataatacttcctgctaag

SEQ ID NO: 5373 - DNA, 23 bp, Artificial Sequence
  Synthetic oligonucleotide
  Mismatch hsa-miR-6874-3p MIMAT0027649
ctagagtcagaattgcagaactg

SEQ ID NO: 5374 - DNA, 22 bp, Artificial Sequence
  Synthetic oligonucleotide
  Mismatch hsa-miR-448 MIMAT0001532
atgggacatccctcatatgcaa

SEQ ID NO: 5375 - DNA, 23 bp, Artificial Sequence
  Synthetic oligonucleotide
  Mismatch hsa-miR-548s MIMAT0014987
aaaataactgcaactttggccat

SEQ ID NO: 5376 - DNA, 24 bp, Artificial Sequence
  Synthetic oligonucleotide
  Mismatch hsa-miR-515-5p MIMAT0002826
cagaaagtgcttttctttggagaa

SEQ ID NO: 5377 - DNA, 19 bp, Artificial Sequence
  Synthetic oligonucleotide
  Mismatch hsa-miR-6891-5p MIMAT0027682
cccctcatttccctcctta

SEQ ID NO: 5378 - DNA, 20 bp, Artificial Sequence
  Synthetic oligonucleotide
  Mismatch hsa-miR-3940-5p MIMAT0019229
cagagcccgttccaacccac

SEQ ID NO: 5379 - DNA, 22 bp, Artificial Sequence
  Synthetic oligonucleotide
  Mismatch hsa-miR-431-3p MIMAT0004757
agaagccctgcttgacgacctg

SEQ ID NO: 5380 - DNA, 23 bp, Artificial Sequence
  Synthetic oligonucleotide
  Mismatch hsa-miR-6832-5p MIMAT0027564
gaccctaactttctctctctact

SEQ ID NO: 5381 - DNA, 23 bp, Artificial Sequence
  Synthetic oligonucleotide
  Mismatch hsa-miR-103a-2-5p MIMAT0009196
caaggcagcactacaaagaagct

SEQ ID NO: 5382 - DNA, 22 bp, Artificial Sequence
  Synthetic oligonucleotide
  Mismatch hsa-miR-6877-5p MIMAT0027654
gcagcttccacttttcggccct

SEQ ID NO: 5383 - DNA, 21 bp, Artificial Sequence
  Synthetic oligonucleotide
  Mismatch hsa-miR-1298-3p MIMAT0026641
gttcagtcagccgcccagatg

SEQ ID NO: 5384 - DNA, 22 bp, Artificial Sequence
  Synthetic oligonucleotide
  Mismatch hsa-miR-3682-5p MIMAT0019222
atgataacacaaatagaagtag

SEQ ID NO: 5385 - DNA, 21 bp, Artificial Sequence
  Synthetic oligonucleotide
  Mismatch hsa-miR-3155a MIMAT0015029
agttcccactatagagcctgg

SEQ ID NO: 5386 - DNA, 21 bp, Artificial Sequence
  Synthetic oligonucleotide
  Mismatch hsa-miR-5089-5p MIMAT0021081
gatgctactctaaaatcccac

SEQ ID NO: 5387 - DNA, 19 bp, Artificial Sequence
  Synthetic oligonucleotide
  Mismatch hsa-miR-648 MIMAT0003318
accagtgctttgcacactt

SEQ ID NO: 5388 - DNA, 22 bp, Artificial Sequence
  Synthetic oligonucleotide
  Mismatch hsa-miR-367-5p MIMAT0004686
agagttgcataccagcaacagt

SEQ ID NO: 5389 - DNA, 22 bp, Artificial Sequence
  Synthetic oligonucleotide
  Mismatch hsa-miR-6740-5p MIMAT0027381
tctcctctctctttcccaaact

SEQ ID NO: 5390 - DNA, 22 bp, Artificial Sequence
  Synthetic oligonucleotide
  Mismatch hsa-miR-450a-2-3p MIMAT0031074
atgaatgcaaatcgtccccaat

SEQ ID NO: 5391 - DNA, 20 bp, Artificial Sequence
  Synthetic oligonucleotide
  Mismatch hsa-miR-6793-3p MIMAT0027487
ctgcgggcaaaggttgggga

SEQ ID NO: 5392 - DNA, 22 bp, Artificial Sequence
  Synthetic oligonucleotide
  Mismatch hsa-miR-3622a-3p MIMAT0018004
acaggcatgggtagtcaggtga

SEQ ID NO: 5393 - DNA, 25 bp, Artificial Sequence
  Synthetic oligonucleotide
  Mismatch hsa-miR-541-5p MIMAT0004919
agtgggaccgacagttgaatccttt

SEQ ID NO: 5394 - DNA, 20 bp, Artificial Sequence
  Synthetic oligonucleotide
  Mismatch hsa-miR-6515-3p MIMAT0025487
ctggggggttaatgaagaga

SEQ ID NO: 5395 - DNA, 20 bp, Artificial Sequence
  Synthetic oligonucleotide
  Mismatch hsa-miR-1276 MIMAT0005930
tgtctccactaggctcttta

SEQ ID NO: 5396 - DNA, 22 bp, Artificial Sequence
  Synthetic oligonucleotide
  Mismatch hsa-miR-6499-3p MIMAT0025451
tgtgggcaaaattaacactgct

SEQ ID NO: 5397 - DNA, 22 bp, Artificial Sequence
  Synthetic oligonucleotide
  Mismatch hsa-miR-2276-3p MIMAT0011775
cctcgcctctgttacttgcaga

SEQ ID NO: 5398 - DNA, 21 bp, Artificial Sequence
  Synthetic oligonucleotide
  Mismatch hsa-miR-3120-3p MIMAT0014982
tgcctgtctattcttgctgtg

SEQ ID NO: 5399 - DNA, 23 bp, Artificial Sequence
  Synthetic oligonucleotide
  Mismatch hsa-miR-6780b-5p MIMAT0027572
tcttccctgccataccttcccca

SEQ ID NO: 5400 - DNA, 24 bp, Artificial Sequence
  Synthetic oligonucleotide
  Mismatch hsa-miR-4769-5p MIMAT0019922
ctcataccttctcctcatcccacc

SEQ ID NO: 5401 - DNA, 22 bp, Artificial Sequence
  Synthetic oligonucleotide
  Mismatch hsa-miR-1306-5p MIMAT0022726
tggacgtttgctagggaggtgg

SEQ ID NO: 5402 - DNA, 22 bp, Artificial Sequence
  Synthetic oligonucleotide
  Mismatch hsa-miR-519b-3p MIMAT0002837
aacctctaaaaaaatgcacttt

SEQ ID NO: 5403 - DNA, 22 bp, Artificial Sequence
  Synthetic oligonucleotide
  Mismatch hsa-miR-489-3p MIMAT0002805
gctgccgtatacatgatgtcac

SEQ ID NO: 5404 - DNA, 21 bp, Artificial Sequence
  Synthetic oligonucleotide
  Mismatch hsa-miR-23a-3p MIMAT0000078
ggaaatccctaacaatgtgat

SEQ ID NO: 5405 - DNA, 23 bp, Artificial Sequence
  Synthetic oligonucleotide
  Mismatch hsa-miR-6796-5p MIMAT0027492
cagccagctctcttaccccacaa

SEQ ID NO: 5406 - DNA, 20 bp, Artificial Sequence
  Synthetic oligonucleotide
  Mismatch hsa-miR-675-3p MIMAT0006790
tgagcggtgtaggcatacag

SEQ ID NO: 5407 - DNA, 22 bp, Artificial Sequence
  Synthetic oligonucleotide
  Mismatch hsa-miR-2110 MIMAT0010133
cactcagcggctatttccccaa

SEQ ID NO: 5408 - DNA, 22 bp, Artificial Sequence
  Synthetic oligonucleotide
  Mismatch hsa-miR-1269a MIMAT0005923
ccagtagcacgattcagtccag

SEQ ID NO: 5409 - DNA, 21 bp, Artificial Sequence
  Synthetic oligonucleotide
  Mismatch hsa-miR-483-3p MIMAT0002173
aagacgggagatgaggagtga

SEQ ID NO: 5410 - DNA, 22 bp, Artificial Sequence
  Synthetic oligonucleotide
  Mismatch hsa-miR-4659a-3p MIMAT0019727
cgttgccatgttcaagaagaaa

SEQ ID NO: 5411 - DNA, 22 bp, Artificial Sequence
  Synthetic oligonucleotide
  Mismatch hsa-miR-146a-5p MIMAT0000449
aacccatggaacccagttctca

SEQ ID NO: 5412 - DNA, 23 bp, Artificial Sequence
  Synthetic oligonucleotide
  Mismatch hsa-miR-1289 MIMAT0005879
aaaatgcagatttttggactcca

SEQ ID NO: 5413 - DNA, 21 bp, Artificial Sequence
  Synthetic oligonucleotide
  Mismatch hsa-miR-8485 MIMAT0033692
atacgtgtgtacgtgtgtgtg

SEQ ID NO: 5414 - DNA, 19 bp, Artificial Sequence
  Synthetic oligonucleotide
  Mismatch hsa-miR-563 MIMAT0003227
gggaaacgcttgtcaacct

SEQ ID NO: 5415 - DNA, 22 bp, Artificial Sequence
  Synthetic oligonucleotide
  Mismatch hsa-miR-425-3p MIMAT0001343
gggcggacacgttattcccgat

SEQ ID NO: 5416 - DNA, 22 bp, Artificial Sequence
  Synthetic oligonucleotide
  Mismatch hsa-miR-4474-3p MIMAT0019001
ttagcctcatgttcagccacaa

SEQ ID NO: 5417 - DNA, 24 bp, Artificial Sequence
  Synthetic oligonucleotide
  Mismatch hsa-miR-5002-5p MIMAT0021023
actaagtgcctcaataaccaaatt

SEQ ID NO: 5418 - DNA, 23 bp, Artificial Sequence
  Synthetic oligonucleotide
  Mismatch hsa-miR-3672 MIMAT0018095
aagatgttttactcgagtctcat

SEQ ID NO: 5419 - DNA, 21 bp, Artificial Sequence
  Synthetic oligonucleotide
  Mismatch hsa-let-7a-3p MIMAT0004481
gaaagacagttaattgtatag

SEQ ID NO: 5420 - DNA, 18 bp, Artificial Sequence
  Synthetic oligonucleotide
  Mismatch hsa-miR-4488 MIMAT0019022
cgccggaatccgccccct

SEQ ID NO: 5421 - DNA, 23 bp, Artificial Sequence
  Synthetic oligonucleotide
  Mismatch hsa-miR-3691-5p MIMAT0018120
gtaccgagtctctttcatccact

SEQ ID NO: 5422 - DNA, 21 bp, Artificial Sequence
  Synthetic oligonucleotide
  Mismatch hsa-miR-3688-5p MIMAT0019223
atatggaaagtttttgccact

SEQ ID NO: 5423 - DNA, 22 bp, Artificial Sequence
  Synthetic oligonucleotide
  Mismatch hsa-miR-532-3p MIMAT0004780
tgcaagccttgaatgtgggagg

SEQ ID NO: 5424 - DNA, 22 bp, Artificial Sequence
  Synthetic oligonucleotide
  Mismatch hsa-miR-4747-5p MIMAT0019882
ctaagaccaagtttccttccct

SEQ ID NO: 5425 - DNA, 21 bp, Artificial Sequence
  Synthetic oligonucleotide
  Mismatch hsa-miR-6813-3p MIMAT0027527
ctggggagagaagccaaggtt

SEQ ID NO: 5426 - DNA, 18 bp, Artificial Sequence
  Synthetic oligonucleotide
  Mismatch hsa-miR-3653-3p MIMAT0018073
cttcagtttacttcttag

SEQ ID NO: 5427 - DNA, 21 bp, Artificial Sequence
  Synthetic oligonucleotide
  Mismatch hsa-miR-3150b-3p MIMAT0018194
ccaacctcgataatctcctca

SEQ ID NO: 5428 - DNA, 22 bp, Artificial Sequence
  Synthetic oligonucleotide
  Mismatch hsa-miR-6858-5p MIMAT0027616
gtccctgccagttcctcctcac

SEQ ID NO: 5429 - DNA, 24 bp, Artificial Sequence
  Synthetic oligonucleotide
  Mismatch hsa-miR-6768-3p MIMAT0027437
gtgcacaggagaacatggcctttg

SEQ ID NO: 5430 - DNA, 21 bp, Artificial Sequence
  Synthetic oligonucleotide
  Mismatch hsa-miR-4797-3p MIMAT0019973
acagagtgccttttactgaga

SEQ ID NO: 5431 - DNA, 22 bp, Artificial Sequence
  Synthetic oligonucleotide
  Mismatch hsa-miR-4684-5p MIMAT0019769
tatgttgcaagctagtagagag

SEQ ID NO: 5432 - DNA, 21 bp, Artificial Sequence
  Synthetic oligonucleotide
  Mismatch hsa-miR-4638-5p MIMAT0019695
acttgtccactacagccgagt

SEQ ID NO: 5433 - DNA, 18 bp, Artificial Sequence
  Synthetic oligonucleotide
  Mismatch hsa-miR-4300 MIMAT0016853
gaagtagctcagctccca

SEQ ID NO: 5434 - DNA, 21 bp, Artificial Sequence
  Synthetic oligonucleotide
  Mismatch hsa-miR-6868-3p MIMAT0027637
ctgcacagacttcagaaggaa

SEQ ID NO: 5435 - DNA, 22 bp, Artificial Sequence
  Synthetic oligonucleotide
  Mismatch hsa-miR-101-5p MIMAT0004513
agcatcagcaccatgataactg

SEQ ID NO: 5436 - DNA, 21 bp, Artificial Sequence
  Synthetic oligonucleotide
  Mismatch hsa-miR-4650-3p MIMAT0019714
atgtcaggccctattctacct

SEQ ID NO: 5437 - DNA, 21 bp, Artificial Sequence
  Synthetic oligonucleotide
  Mismatch hsa-miR-6771-3p MIMAT0027443
ctgcgggtagttaggggtttg

SEQ ID NO: 5438 - DNA, 21 bp, Artificial Sequence
  Synthetic oligonucleotide
  Mismatch hsa-miR-6748-3p MIMAT0027397
ctgtaggagattgggacagga

SEQ ID NO: 5439 - DNA, 27 bp, Artificial Sequence
  Synthetic oligonucleotide
  Mismatch hsa-miR-1248 MIMAT0005900
tttagcacagtgcttactcaagaaggt

SEQ ID NO: 5440 - DNA, 17 bp, Artificial Sequence
  Synthetic oligonucleotide
  Mismatch hsa-miR-4463 MIMAT0018987
ggccccttcccagtctc

SEQ ID NO: 5441 - DNA, 20 bp, Artificial Sequence
  Synthetic oligonucleotide
  Mismatch hsa-miR-6794-5p MIMAT0027488
gctcaccccttgtccccctg

SEQ ID NO: 5442 - DNA, 21 bp, Artificial Sequence
  Synthetic oligonucleotide
  Mismatch hsa-miR-4763-5p MIMAT0019912
agcaggagggtcgggcaggcg

SEQ ID NO: 5443 - DNA, 19 bp, Artificial Sequence
  Synthetic oligonucleotide
  Mismatch hsa-miR-6132 MIMAT0024616
tgcaatccttagccctgct

SEQ ID NO: 5444 - DNA, 18 bp, Artificial Sequence
  Synthetic oligonucleotide
  Mismatch hsa-miR-1306-3p MIMAT0005950
caccacctaagccaacgt

SEQ ID NO: 5445 - DNA, 22 bp, Artificial Sequence
  Synthetic oligonucleotide
  Mismatch hsa-miR-579-5p MIMAT0026616
cgtcatctggcttaaaccgcga

SEQ ID NO: 5446 - DNA, 20 bp, Artificial Sequence
  Synthetic oligonucleotide
  Mismatch hsa-miR-3917 MIMAT0018191
cccacctgcctagtccgagc

SEQ ID NO: 5447 - DNA, 23 bp, Artificial Sequence
  Synthetic oligonucleotide
  Mismatch hsa-miR-4793-3p MIMAT0019966
agccagccaactttcagtgcaga

SEQ ID NO: 5448 - DNA, 19 bp, Artificial Sequence
  Synthetic oligonucleotide
  Mismatch hsa-miR-575 MIMAT0003240
gctcctgtttaactggctc

SEQ ID NO: 5449 - DNA, 22 bp, Artificial Sequence
  Synthetic oligonucleotide
  Mismatch hsa-miR-496 MIMAT0002818
gagattggccacataatactca

SEQ ID NO: 5450 - DNA, 20 bp, Artificial Sequence
  Synthetic oligonucleotide
  Mismatch hsa-miR-320c MIMAT0005793
accctctcattccagctttt

SEQ ID NO: 5451 - DNA, 22 bp, Artificial Sequence
  Synthetic oligonucleotide
  Mismatch hsa-miR-6818-3p MIMAT0027537
ctgtgtgaggattaagagacaa

SEQ ID NO: 5452 - DNA, 21 bp, Artificial Sequence
  Synthetic oligonucleotide
  Mismatch hsa-miR-3162-3p MIMAT0019213
tggggagtggtagggtaggga

SEQ ID NO: 5453 - DNA, 24 bp, Artificial Sequence
  Synthetic oligonucleotide
  Mismatch hsa-miR-661 MIMAT0003324
acgcgcaggccagtaacccaggca

SEQ ID NO: 5454 - DNA, 25 bp, Artificial Sequence
  Synthetic oligonucleotide
  Mismatch hsa-miR-6797-5p MIMAT0027494
tcctgttctcagccttttccctcct

SEQ ID NO: 5455 - DNA, 23 bp, Artificial Sequence
  Synthetic oligonucleotide
  Mismatch hsa-miR-5705 MIMAT0022499
cacaggccatgaatcccgaaaca

SEQ ID NO: 5456 - DNA, 22 bp, Artificial Sequence
  Synthetic oligonucleotide
  Mismatch hsa-miR-6767-3p MIMAT0027435
ctgcggaaagaatagcacgtgg

SEQ ID NO: 5457 - DNA, 23 bp, Artificial Sequence
  Synthetic oligonucleotide
  Mismatch hsa-miR-4722-5p MIMAT0019836
caacctggcacaatcctcctgcc

SEQ ID NO: 5458 - DNA, 22 bp, Artificial Sequence
  Synthetic oligonucleotide
  Mismatch hsa-miR-4477a MIMAT0019004
gaatcacaaatacccttaatag

SEQ ID NO: 5459 - DNA, 22 bp, Artificial Sequence
  Synthetic oligonucleotide
  Mismatch hsa-miR-375 MIMAT0000728
tcacgcgagccatacgaacaaa

SEQ ID NO: 5460 - DNA, 21 bp, Artificial Sequence
  Synthetic oligonucleotide
  Mismatch hsa-miR-424-3p MIMAT0004749
atagcagcgctccacgttttg

SEQ ID NO: 5461 - DNA, 22 bp, Artificial Sequence
  Synthetic oligonucleotide
  Mismatch hsa-miR-499b-3p MIMAT0019898
tgttaagacttatagtgatgtt

SEQ ID NO: 5462 - DNA, 24 bp, Artificial Sequence
  Synthetic oligonucleotide
  Mismatch hsa-miR-1277-5p MIMAT0022724
atacgtacatatacttatatattt

SEQ ID NO: 5463 - DNA, 23 bp, Artificial Sequence
  Synthetic oligonucleotide
  Mismatch hsa-miR-1238-5p MIMAT0022947
cacacactggggtccccactcac

SEQ ID NO: 5464 - DNA, 22 bp, Artificial Sequence
  Synthetic oligonucleotide
  Mismatch hsa-miR-4799-5p MIMAT0019976
gactggcatgccacatttagat

SEQ ID NO: 5465 - DNA, 21 bp, Artificial Sequence
  Synthetic oligonucleotide
  Mismatch hsa-miR-3074-5p MIMAT0019208
ctggctcagtctagcaggaac

SEQ ID NO: 5466 - DNA, 21 bp, Artificial Sequence
  Synthetic oligonucleotide
  Mismatch hsa-miR-95-5p MIMAT0026473
aattcaacagttatttattga

SEQ ID NO: 5467 - DNA, 23 bp, Artificial Sequence
  Synthetic oligonucleotide
  Mismatch hsa-miR-7157-5p MIMAT0028224
tctctggtgccatcgaatgctga

SEQ ID NO: 5468 - DNA, 21 bp, Artificial Sequence
  Synthetic oligonucleotide
  Mismatch hsa-miR-4436a MIMAT0018952
atccacttctatctgtcctgc

SEQ ID NO: 5469 - DNA, 19 bp, Artificial Sequence
  Synthetic oligonucleotide
  Mismatch hsa-miR-4634 MIMAT0019691
ccccgggctagtcgcgccg

SEQ ID NO: 5470 - DNA, 24 bp, Artificial Sequence
  Synthetic oligonucleotide
  Mismatch hsa-miR-664b-5p MIMAT0022271
tacccaatcatctttcttagccca

SEQ ID NO: 5471 - DNA, 21 bp, Artificial Sequence
  Synthetic oligonucleotide
  Mismatch hsa-miR-4525 MIMAT0019064
aaccagcatgttcatcccccc

SEQ ID NO: 5472 - DNA, 21 bp, Artificial Sequence
  Synthetic oligonucleotide
  Mismatch hsa-miR-486-3p MIMAT0004762
atcctgtactatgctgccccg

SEQ ID NO: 5473 - DNA, 22 bp, Artificial Sequence
  Synthetic oligonucleotide
  Mismatch hsa-miR-302c-5p MIMAT0000716
cagcaggtaccttcatgttaaa

SEQ ID NO: 5474 - DNA, 22 bp, Artificial Sequence
  Synthetic oligonucleotide
  Mismatch hsa-miR-449a MIMAT0001541
accagctaacatcacactgcca

SEQ ID NO: 5475 - DNA, 24 bp, Artificial Sequence
  Synthetic oligonucleotide
  Mismatch hsa-miR-5001-5p MIMAT0021021
agctccgccgctgtatccagccct

SEQ ID NO: 5476 - DNA, 22 bp, Artificial Sequence
  Synthetic oligonucleotide
  Mismatch hsa-miR-4765 MIMAT0019916
gaacatagctactaatcactca

SEQ ID NO: 5477 - DNA, 22 bp, Artificial Sequence
  Synthetic oligonucleotide
  Mismatch hsa-miR-3619-5p MIMAT0017999
gctgcaccagctcgcctgctga

SEQ ID NO: 5478 - DNA, 21 bp, Artificial Sequence
  Synthetic oligonucleotide
  Mismatch hsa-miR-7113-5p MIMAT0028123
ctcacacactacctccctgga

SEQ ID NO: 5479 - DNA, 22 bp, Artificial Sequence
  Synthetic oligonucleotide
  Mismatch hsa-miR-766-3p MIMAT0003888
gctgaggctgtaaggctggagt

SEQ ID NO: 5480 - DNA, 22 bp, Artificial Sequence
  Synthetic oligonucleotide
  Mismatch hsa-miR-487b-3p MIMAT0003180
aagtggatgactttgtacgatt

SEQ ID NO: 5481 - DNA, 23 bp, Artificial Sequence
  Synthetic oligonucleotide
  Mismatch hsa-miR-330-3p MIMAT0000751
tctctgcaggccacgtgctttgc

SEQ ID NO: 5482 - DNA, 18 bp, Artificial Sequence
  Synthetic oligonucleotide
  Mismatch hsa-miR-4257 MIMAT0016878
ctcagtcttcacctctgg

SEQ ID NO: 5483 - DNA, 17 bp, Artificial Sequence
  Synthetic oligonucleotide
  Mismatch hsa-miR-4264 MIMAT0016899
aatgactttgactgagt

SEQ ID NO: 5484 - DNA, 22 bp, Artificial Sequence
  Synthetic oligonucleotide
  Mismatch hsa-miR-489-5p MIMAT0026605
aaatggcgtcattcatacgacc

SEQ ID NO: 5485 - DNA, 22 bp, Artificial Sequence
  Synthetic oligonucleotide
  Mismatch hsa-miR-92b-5p MIMAT0004792
cactgcaccgcaccccgtccct

SEQ ID NO: 5486 - DNA, 20 bp, Artificial Sequence
  Synthetic oligonucleotide
  Mismatch hsa-miR-6829-3p MIMAT0027559
ctgaggccatagaggaggca

SEQ ID NO: 5487 - DNA, 22 bp, Artificial Sequence
  Synthetic oligonucleotide
  Mismatch hsa-miR-6766-3p MIMAT0027433
tgagggtggggatagacaatca

SEQ ID NO: 5488 - DNA, 22 bp, Artificial Sequence
  Synthetic oligonucleotide
  Mismatch hsa-miR-5584-5p MIMAT0022283
tctagttcttcttatttccctg

SEQ ID NO: 5489 - DNA, 18 bp, Artificial Sequence
  Synthetic oligonucleotide
  Mismatch hsa-miR-4710 MIMAT0019815
aaccacccaccctcaccc

SEQ ID NO: 5490 - DNA, 20 bp, Artificial Sequence
  Synthetic oligonucleotide
  Mismatch hsa-miR-3910 MIMAT0018184
tgtcttggtcctatgccttt

SEQ ID NO: 5491 - DNA, 22 bp, Artificial Sequence
  Synthetic oligonucleotide
  Mismatch hsa-miR-885-5p MIMAT0004947
agaggcagggttatgtaatgga

SEQ ID NO: 5492 - DNA, 17 bp, Artificial Sequence
  Synthetic oligonucleotide
  Mismatch hsa-miR-302e MIMAT0005931
aagcataaaagcactta

SEQ ID NO: 5493 - DNA, 23 bp, Artificial Sequence
  Synthetic oligonucleotide
  Mismatch hsa-miR-4715-3p MIMAT0019825
attggctgcagtctaggtggcac

SEQ ID NO: 5494 - DNA, 20 bp, Artificial Sequence
  Synthetic oligonucleotide
  Mismatch hsa-miR-1282 MIMAT0005940
aagcagaaattggcaaacga

SEQ ID NO: 5495 - DNA, 21 bp, Artificial Sequence
  Synthetic oligonucleotide
  Mismatch hsa-miR-3124-5p MIMAT0014986
gactttgcctctgcccgcgaa

SEQ ID NO: 5496 - DNA, 22 bp, Artificial Sequence
  Synthetic oligonucleotide
  Mismatch hsa-miR-4750-5p MIMAT0019887
cactcaaccactcccgcccgag

SEQ ID NO: 5497 - DNA, 22 bp, Artificial Sequence
  Synthetic oligonucleotide
  Mismatch hsa-miR-191-3p MIMAT0001618
ggggacgaaatttaagcgcagc

SEQ ID NO: 5498 - DNA, 21 bp, Artificial Sequence
  Synthetic oligonucleotide
  Mismatch hsa-miR-6841-3p MIMAT0027585
ctggggatgctaatgcaaggt

SEQ ID NO: 5499 - DNA, 19 bp, Artificial Sequence
  Synthetic oligonucleotide
  Mismatch hsa-miR-1301-5p MIMAT0026639
tgctgcggcacctagagcg

SEQ ID NO: 5500 - DNA, 22 bp, Artificial Sequence
  Synthetic oligonucleotide
  Mismatch hsa-miR-3928-3p MIMAT0018205
gccgaagctccttggttcctcc

SEQ ID NO: 5501 - DNA, 20 bp, Artificial Sequence
  Synthetic oligonucleotide
  Mismatch hsa-miR-6799-5p MIMAT0027498
ccagccctgttcacctcccc

SEQ ID NO: 5502 - DNA, 22 bp, Artificial Sequence
  Synthetic oligonucleotide
  Mismatch hsa-miR-20a-3p MIMAT0004493
ctttaagtgcttttaatgcagt

SEQ ID NO: 5503 - DNA, 22 bp, Artificial Sequence
  Synthetic oligonucleotide
  Mismatch hsa-miR-6787-3p MIMAT0027475
ctggagagggctacagctgaga

SEQ ID NO: 5504 - DNA, 20 bp, Artificial Sequence
  Synthetic oligonucleotide
  Mismatch hsa-miR-1915-3p MIMAT0007892
cccgccgcgctgccctgggg

SEQ ID NO: 5505 - DNA, 22 bp, Artificial Sequence
  Synthetic oligonucleotide
  Mismatch hsa-miR-603 MIMAT0003271
gcaaaagtaatcacagtgtgtg

SEQ ID NO: 5506 - DNA, 22 bp, Artificial Sequence
  Synthetic oligonucleotide
  Mismatch hsa-miR-32-5p MIMAT0000090
tgcaacttagttttgtgcaata

SEQ ID NO: 5507 - DNA, 22 bp, Artificial Sequence
  Synthetic oligonucleotide
  Mismatch hsa-miR-5706 MIMAT0022500
agcttcagcatactatccagaa

SEQ ID NO: 5508 - DNA, 22 bp, Artificial Sequence
  Synthetic oligonucleotide
  Mismatch hsa-miR-6778-5p MIMAT0027456
acctgcctcctaccctcccact

SEQ ID NO: 5509 - DNA, 24 bp, Artificial Sequence
  Synthetic oligonucleotide
  Mismatch hsa-miR-1301-3p MIMAT0005797
gaagtcactcccaaacagctgcaa

SEQ ID NO: 5510 - DNA, 19 bp, Artificial Sequence
  Synthetic oligonucleotide
  Mismatch hsa-miR-1273f MIMAT0020601
cactgcaatttccatctcc

SEQ ID NO: 5511 - DNA, 22 bp, Artificial Sequence
  Synthetic oligonucleotide
  Mismatch hsa-miR-4777-5p MIMAT0019934
tatatatatcttccatctagaa

SEQ ID NO: 5512 - DNA, 22 bp, Artificial Sequence
  Synthetic oligonucleotide
  Mismatch hsa-miR-3938 MIMAT0018353
ccgggttatctttaagggaatt

SEQ ID NO: 5513 - DNA, 23 bp, Artificial Sequence
  Synthetic oligonucleotide
  Mismatch hsa-miR-371b-3p MIMAT0019893
gcactcaaactgcaggggcactt

SEQ ID NO: 5514 - DNA, 23 bp, Artificial Sequence
  Synthetic oligonucleotide
  Mismatch hsa-miR-7112-3p MIMAT0028122
ctagggccaaagattgtgatgca

SEQ ID NO: 5515 - DNA, 22 bp, Artificial Sequence
  Synthetic oligonucleotide
  Mismatch hsa-miR-370-3p MIMAT0000722
accaggttccattccagcaggc

SEQ ID NO: 5516 - DNA, 22 bp, Artificial Sequence
  Synthetic oligonucleotide
  Mismatch hsa-miR-574-3p MIMAT0003239
tgtgggtgtgtatatgagcgtg

SEQ ID NO: 5517 - DNA, 24 bp, Artificial Sequence
  Synthetic oligonucleotide
  Mismatch hsa-miR-4751 MIMAT0019888
ccttctagcagctttgggtcctct

SEQ ID NO: 5518 - DNA, 20 bp, Artificial Sequence
  Synthetic oligonucleotide
  Mismatch hsa-miR-8071 MIMAT0030998
ccacccactttagtccaccg

SEQ ID NO: 5519 - DNA, 22 bp, Artificial Sequence
  Synthetic oligonucleotide
  Mismatch hsa-miR-23a-5p MIMAT0004496
aaatcccatccttaggaacccc

SEQ ID NO: 5520 - DNA, 23 bp, Artificial Sequence
  Synthetic oligonucleotide
  Mismatch hsa-miR-329-5p MIMAT0026555
gaaacagaaaccttgaaaacctc

SEQ ID NO: 5521 - DNA, 23 bp, Artificial Sequence
  Synthetic oligonucleotide
  Mismatch hsa-miR-372-3p MIMAT0000724
acgctcaaatgttacagcacttt

SEQ ID NO: 5522 - DNA, 22 bp, Artificial Sequence
  Synthetic oligonucleotide
  Mismatch hsa-miR-4479 MIMAT0019011
ctgctccgagcttggccgcgcg

SEQ ID NO: 5523 - DNA, 22 bp, Artificial Sequence
  Synthetic oligonucleotide
  Mismatch hsa-miR-105-3p MIMAT0004516
tagcacatgctttaacatccgt

SEQ ID NO: 5524 - DNA, 20 bp, Artificial Sequence
  Synthetic oligonucleotide
  Mismatch hsa-miR-4326 MIMAT0016888
gtctgggagttagaggaaca

SEQ ID NO: 5525 - DNA, 22 bp, Artificial Sequence
  Synthetic oligonucleotide
  Mismatch hsa-let-7b-5p MIMAT0000063
aaccacacaactcactacctca

SEQ ID NO: 5526 - DNA, 23 bp, Artificial Sequence
  Synthetic oligonucleotide
  Mismatch hsa-miR-6751-5p MIMAT0027402
ccagacaccaactccacccccaa

SEQ ID NO: 5527 - DNA, 21 bp, Artificial Sequence
  Synthetic oligonucleotide
  Mismatch hsa-miR-3192-3p MIMAT0027027
gagctgagagaacgatcagag

SEQ ID NO: 5528 - DNA, 22 bp, Artificial Sequence
  Synthetic oligonucleotide
  Mismatch hsa-miR-6856-3p MIMAT0027613
ctggaaagatcttagggctgta

SEQ ID NO: 5529 - DNA, 22 bp, Artificial Sequence
  Synthetic oligonucleotide
  Mismatch hsa-miR-6807-5p MIMAT0027514
cctctccattcttctggctcac

SEQ ID NO: 5530 - DNA, 25 bp, Artificial Sequence
  Synthetic oligonucleotide
  Mismatch hsa-miR-6735-5p MIMAT0027371
tcagattcctgtgctttctgccctg

SEQ ID NO: 5531 - DNA, 22 bp, Artificial Sequence
  Synthetic oligonucleotide
  Mismatch hsa-miR-5680 MIMAT0022468
gcagattagtcttgcatttctc

SEQ ID NO: 5532 - DNA, 22 bp, Artificial Sequence
  Synthetic oligonucleotide
  Mismatch hsa-miR-30a-5p MIMAT0000087
cttccagtcgaaaatgtttaca

SEQ ID NO: 5533 - DNA, 21 bp, Artificial Sequence
  Synthetic oligonucleotide
  Mismatch hsa-miR-1207-5p MIMAT0005871
cccctcccagtttccctgcca

SEQ ID NO: 5534 - DNA, 21 bp, Artificial Sequence
  Synthetic oligonucleotide
  Mismatch hsa-miR-6844 MIMAT0027589
ctgtgaattattaacaaagaa

SEQ ID NO: 5535 - DNA, 21 bp, Artificial Sequence
  Synthetic oligonucleotide
  Mismatch hsa-miR-4438 MIMAT0018956
actgtctttttcaagcctgtg

SEQ ID NO: 5536 - DNA, 21 bp, Artificial Sequence
  Synthetic oligonucleotide
  Mismatch hsa-miR-3189-3p MIMAT0015071
ctaccccatctaacccaaggg

SEQ ID NO: 5537 - DNA, 22 bp, Artificial Sequence
  Synthetic oligonucleotide
  Mismatch hsa-miR-6880-5p MIMAT0027660
gagctgccctccccctccacca

SEQ ID NO: 5538 - DNA, 23 bp, Artificial Sequence
  Synthetic oligonucleotide
  Mismatch hsa-miR-6805-3p MIMAT0027511
ctgggggcggggatgcagagcaa

SEQ ID NO: 5539 - DNA, 22 bp, Artificial Sequence
  Synthetic oligonucleotide
  Mismatch hsa-miR-302b-5p MIMAT0000714
gaaagcacttctttgttaaagt

SEQ ID NO: 5540 - DNA, 23 bp, Artificial Sequence
  Synthetic oligonucleotide
  Mismatch hsa-miR-623 MIMAT0003292
acccaacagccctcgcaagggat

SEQ ID NO: 5541 - DNA, 21 bp, Artificial Sequence
  Synthetic oligonucleotide
  Mismatch hsa-miR-875-3p MIMAT0004923
cacaacctcaacgtttccagg

SEQ ID NO: 5542 - DNA, 21 bp, Artificial Sequence
  Synthetic oligonucleotide
  Mismatch hsa-miR-6869-3p MIMAT0027639
gctgagccgacacgcgcggcg

SEQ ID NO: 5543 - DNA, 23 bp, Artificial Sequence
  Synthetic oligonucleotide
  Mismatch hsa-miR-657 MIMAT0003335
cctagagagggtatgaacctgcc

SEQ ID NO: 5544 - DNA, 22 bp, Artificial Sequence
  Synthetic oligonucleotide
  Mismatch hsa-miR-4689 MIMAT0019778
ggcccccaccacatctcctcaa

SEQ ID NO: 5545 - DNA, 22 bp, Artificial Sequence
  Synthetic oligonucleotide
  Mismatch hsa-miR-136-3p MIMAT0004606
agactcatttgtaacgatgatg

SEQ ID NO: 5546 - DNA, 22 bp, Artificial Sequence
  Synthetic oligonucleotide
  Mismatch hsa-miR-519a-3p MIMAT0002869
acactctaaaaaaatgcacttt

SEQ ID NO: 5547 - DNA, 21 bp, Artificial Sequence
  Synthetic oligonucleotide
  Mismatch hsa-miR-5003-3p MIMAT0021026
ccccaacaactcagaaaagta

SEQ ID NO: 5548 - DNA, 22 bp, Artificial Sequence
  Synthetic oligonucleotide
  Mismatch hsa-miR-576-5p MIMAT0003241
aaagacgtggaataattagaat

SEQ ID NO: 5549 - DNA, 23 bp, Artificial Sequence
  Synthetic oligonucleotide
  Mismatch hsa-miR-371a-3p MIMAT0000723
acactcaaaagacagcggcactt

SEQ ID NO: 5550 - DNA, 23 bp, Artificial Sequence
  Synthetic oligonucleotide
  Mismatch hsa-miR-6762-3p MIMAT0027425
ctggagaccaagaaaagcagcca

SEQ ID NO: 5551 - DNA, 22 bp, Artificial Sequence
  Synthetic oligonucleotide
  Mismatch hsa-miR-586 MIMAT0003252
ggacctaaaaactcaatgcata

SEQ ID NO: 5552 - DNA, 21 bp, Artificial Sequence
  Synthetic oligonucleotide
  Mismatch hsa-miR-621 MIMAT0003290
aggtaagcgccattgctagcc

SEQ ID NO: 5553 - DNA, 21 bp, Artificial Sequence
  Synthetic oligonucleotide
  Mismatch hsa-miR-6791-3p MIMAT0027483
ctgccggagattaaggaggca

SEQ ID NO: 5554 - DNA, 22 bp, Artificial Sequence
  Synthetic oligonucleotide
  Mismatch hsa-miR-4664-5p MIMAT0019737
aacttgcggagcaggcacccca

SEQ ID NO: 5555 - DNA, 22 bp, Artificial Sequence
  Synthetic oligonucleotide
  Mismatch hsa-miR-4436b-3p MIMAT0019941
ttgtccacttccccctgccctg

SEQ ID NO: 5556 - DNA, 22 bp, Artificial Sequence
  Synthetic oligonucleotide
  Mismatch hsa-miR-3150a-5p MIMAT0019206
gctgaggagattatcgaggttg

SEQ ID NO: 5557 - DNA, 24 bp, Artificial Sequence
  Synthetic oligonucleotide
  Mismatch hsa-miR-3692-3p MIMAT0018122
acttctgcagtgtttgtgtggaac

SEQ ID NO: 5558 - DNA, 22 bp, Artificial Sequence
  Synthetic oligonucleotide
  Mismatch hsa-miR-338-5p MIMAT0004701
cactcagcacctagatattgtt

SEQ ID NO: 5559 - DNA, 23 bp, Artificial Sequence
  Synthetic oligonucleotide
  Mismatch hsa-miR-4693-3p MIMAT0019785
aaatactgtgaaccccactctca

SEQ ID NO: 5560 - DNA, 22 bp, Artificial Sequence
  Synthetic oligonucleotide
  Mismatch hsa-miR-543 MIMAT0004954
aagaagtgcactacgaatgttt

SEQ ID NO: 5561 - DNA, 18 bp, Artificial Sequence
  Synthetic oligonucleotide
  Mismatch hsa-miR-151b MIMAT0010214
agactgtatgctcctcga

SEQ ID NO: 5562 - DNA, 21 bp, Artificial Sequence
  Synthetic oligonucleotide
  Mismatch hsa-miR-211-3p MIMAT0022694
gcacccctttattgtccctgc

SEQ ID NO: 5563 - DNA, 18 bp, Artificial Sequence
  Synthetic oligonucleotide
  Mismatch hsa-miR-7150 MIMAT0028211
tacctctttccctgccag

SEQ ID NO: 5564 - DNA, 21 bp, Artificial Sequence
  Synthetic oligonucleotide
  Mismatch hsa-miR-4445-3p MIMAT0018964
tggattgttttctttgccgtg

SEQ ID NO: 5565 - DNA, 23 bp, Artificial Sequence
  Synthetic oligonucleotide
  Mismatch hsa-miR-96-5p MIMAT0000095
agcaaaaatgtgtcagtgccaaa

SEQ ID NO: 5566 - DNA, 21 bp, Artificial Sequence
  Synthetic oligonucleotide
  Mismatch hsa-miR-5579-5p MIMAT0022269
gttagcttaaaaagtaccata

SEQ ID NO: 5567 - DNA, 22 bp, Artificial Sequence
  Synthetic oligonucleotide
  Mismatch hsa-miR-887-3p MIMAT0004951
cctcgggatggtacccgttcac

SEQ ID NO: 5568 - DNA, 25 bp, Artificial Sequence
  Synthetic oligonucleotide
  Mismatch hsa-miR-593-5p MIMAT0003261
gctgagcaatgcctaactggtgcct

SEQ ID NO: 5569 - DNA, 22 bp, Artificial Sequence
  Synthetic oligonucleotide
  Mismatch hsa-miR-3689a-5p MIMAT0018117
tcccaggaacctcgatatcaca

SEQ ID NO: 5570 - DNA, 23 bp, Artificial Sequence
  Synthetic oligonucleotide
  Mismatch hsa-miR-618 MIMAT0003287
actcagaaggacttgtagagttt

SEQ ID NO: 5571 - DNA, 20 bp, Artificial Sequence
  Synthetic oligonucleotide
  Mismatch hsa-miR-6504-3p MIMAT0025465
agaatggctacgctgtaatg

SEQ ID NO: 5572 - DNA, 18 bp, Artificial Sequence
  Synthetic oligonucleotide
  Mismatch hsa-miR-4282 MIMAT0016912
tcctggacacaaatttta

SEQ ID NO: 5573 - DNA, 20 bp, Artificial Sequence
  Synthetic oligonucleotide
  Mismatch hsa-miR-1228-3p MIMAT0005583
ggggggcgaaacaggtgtga

SEQ ID NO: 5574 - DNA, 22 bp, Artificial Sequence
  Synthetic oligonucleotide
  Mismatch hsa-miR-106a-3p MIMAT0004517
gtaagaagtgcccacattgcag

SEQ ID NO: 5575 - DNA, 22 bp, Artificial Sequence
  Synthetic oligonucleotide
  Mismatch hsa-miR-491-5p MIMAT0002807
cctcatggaagaattccccact

SEQ ID NO: 5576 - DNA, 22 bp, Artificial Sequence
  Synthetic oligonucleotide
  Mismatch hsa-miR-4685-3p MIMAT0019772
ctagccagggctagaagggaga

SEQ ID NO: 5577 - DNA, 22 bp, Artificial Sequence
  Synthetic oligonucleotide
  Mismatch hsa-miR-548al MIMAT0019024
tggtacaaaagctattgccgtt

SEQ ID NO: 5578 - DNA, 21 bp, Artificial Sequence
  Synthetic oligonucleotide
  Mismatch hsa-miR-6765-3p MIMAT0027431
ctgggcgggcttgccaggtga

SEQ ID NO: 5579 - DNA, 20 bp, Artificial Sequence
  Synthetic oligonucleotide
  Mismatch hsa-miR-511-3p MIMAT0026606
tctgtctttcactacacatt

SEQ ID NO: 5580 - DNA, 17 bp, Artificial Sequence
  Synthetic oligonucleotide
  Mismatch hsa-miR-4286 MIMAT0016916
ggtacctagagtggggt

SEQ ID NO: 5581 - DNA, 20 bp, Artificial Sequence
  Synthetic oligonucleotide
  Mismatch hsa-miR-627-3p MIMAT0026623
agtgagtctttaagaaaaga

SEQ ID NO: 5582 - DNA, 19 bp, Artificial Sequence
  Synthetic oligonucleotide
  Mismatch hsa-miR-644a MIMAT0003314
gctctaagttagccacact

SEQ ID NO: 5583 - DNA, 22 bp, Artificial Sequence
  Synthetic oligonucleotide
  Mismatch hsa-miR-124-5p MIMAT0004591
atcaaggtccgtcgtgaacacg

SEQ ID NO: 5584 - DNA, 21 bp, Artificial Sequence
  Synthetic oligonucleotide
  Mismatch hsa-miR-6887-3p MIMAT0027675
ctaggaggaatatggagggga

SEQ ID NO: 5585 - DNA, 22 bp, Artificial Sequence
  Synthetic oligonucleotide
  Mismatch hsa-miR-4449 MIMAT0018968
tgcctcgcgcaatcccgggacg

SEQ ID NO: 5586 - DNA, 24 bp, Artificial Sequence
  Synthetic oligonucleotide
  Mismatch hsa-miR-641 MIMAT0003311
gaggtgactctattttatgtcttt

SEQ ID NO: 5587 - DNA, 22 bp, Artificial Sequence
  Synthetic oligonucleotide
  Mismatch hsa-miR-1285-3p MIMAT0005876
aggtctcacttcattgcccaga

SEQ ID NO: 5588 - DNA, 23 bp, Artificial Sequence
  Synthetic oligonucleotide
  Mismatch hsa-miR-1193 MIMAT0015049
gcacgtcaccggcttaccatccc

SEQ ID NO: 5589 - DNA, 23 bp, Artificial Sequence
  Synthetic oligonucleotide
  Mismatch hsa-miR-3153 MIMAT0015026
aaatgtccctacctgctttcccc

SEQ ID NO: 5590 - DNA, 22 bp, Artificial Sequence
  Synthetic oligonucleotide
  Mismatch hsa-miR-30a-3p MIMAT0000088
gctgcaaacatttgactgaaag

SEQ ID NO: 5591 - DNA, 19 bp, Artificial Sequence
  Synthetic oligonucleotide
  Mismatch hsa-miR-4312 MIMAT0016864
tggggacaaaaacaaggcc

SEQ ID NO: 5592 - DNA, 21 bp, Artificial Sequence
  Synthetic oligonucleotide
  Mismatch hsa-miR-5006-5p MIMAT0021033
ttccacctcccaccctggcaa

SEQ ID NO: 5593 - DNA, 21 bp, Artificial Sequence
  Synthetic oligonucleotide
  Mismatch hsa-miR-525-5p MIMAT0002838
agaaagtgcactcctctggag

SEQ ID NO: 5594 - DNA, 20 bp, Artificial Sequence
  Synthetic oligonucleotide
  Mismatch hsa-miR-6733-3p MIMAT0027368
ctaggaaatttagacactga

SEQ ID NO: 5595 - DNA, 25 bp, Artificial Sequence
  Synthetic oligonucleotide
  Mismatch hsa-miR-203a-5p MIMAT0031890
aactgttgaactgtctagaaccact

SEQ ID NO: 5596 - DNA, 18 bp, Artificial Sequence
  Synthetic oligonucleotide
  Mismatch hsa-miR-4711-3p MIMAT0019817
atcaagcttgaagacacg

SEQ ID NO: 5597 - DNA, 23 bp, Artificial Sequence
  Synthetic oligonucleotide
  Mismatch hsa-miR-20b-5p MIMAT0001413
ctacctgcactacaagcactttg

SEQ ID NO: 5598 - DNA, 22 bp, Artificial Sequence
  Synthetic oligonucleotide
  Mismatch hsa-miR-5699-5p MIMAT0027103
cttgtccttccccgttggggca

SEQ ID NO: 5599 - DNA, 18 bp, Artificial Sequence
  Synthetic oligonucleotide
  Mismatch hsa-miR-1260a MIMAT0005911
tggtggctaaggtgggat

SEQ ID NO: 5600 - DNA, 22 bp, Artificial Sequence
  Synthetic oligonucleotide
  Mismatch hsa-miR-5692c MIMAT0022476
gtacacctactacgatattatt

SEQ ID NO: 5601 - DNA, 23 bp, Artificial Sequence
  Synthetic oligonucleotide
  Mismatch hsa-miR-3161 MIMAT0015035
atctgggcctctactcttatcag

SEQ ID NO: 5602 - DNA, 23 bp, Artificial Sequence
  Synthetic oligonucleotide
  Mismatch hsa-miR-3591-5p MIMAT0019876
tcaaacgccatttccacactaaa

SEQ ID NO: 5603 - DNA, 21 bp, Artificial Sequence
  Synthetic oligonucleotide
  Mismatch hsa-miR-6763-3p MIMAT0027427
ctgggggcagtagccggggag

SEQ ID NO: 5604 - DNA, 23 bp, Artificial Sequence
  Synthetic oligonucleotide
  Mismatch hsa-miR-92a-1-5p MIMAT0004507
agcattgcaaccattcccaacct

SEQ ID NO: 5605 - DNA, 23 bp, Artificial Sequence
  Synthetic oligonucleotide
  Mismatch hsa-miR-548h-3p MIMAT0022723
tgcaaaagtaatcacggtttttg

SEQ ID NO: 5606 - DNA, 16 bp, Artificial Sequence
  Synthetic oligonucleotide
  Mismatch hsa-miR-4297 MIMAT0016846
cacagttaggaaggca

SEQ ID NO: 5607 - DNA, 22 bp, Artificial Sequence
  Synthetic oligonucleotide
  Mismatch hsa-miR-4457 MIMAT0018979
tacgccagtcatcaccttgtga

SEQ ID NO: 5608 - DNA, 23 bp, Artificial Sequence
  Synthetic oligonucleotide
  Mismatch hsa-miR-3680-3p MIMAT0018107
cctactcccaggaccatgcaaaa

SEQ ID NO: 5609 - DNA, 20 bp, Artificial Sequence
  Synthetic oligonucleotide
  Mismatch hsa-miR-2392 MIMAT0019043
cacctctcattcccatccta

SEQ ID NO: 5610 - DNA, 25 bp, Artificial Sequence
  Synthetic oligonucleotide
  Mismatch hsa-miR-548t-3p MIMAT0022730
tggtgcaaaagtaaccgtggttttt

SEQ ID NO: 5611 - DNA, 20 bp, Artificial Sequence
  Synthetic oligonucleotide
  Mismatch hsa-miR-4784 MIMAT0019948
tcagtcccaatatctcctca

SEQ ID NO: 5612 - DNA, 22 bp, Artificial Sequence
  Synthetic oligonucleotide
  Mismatch hsa-miR-2682-3p MIMAT0013518
ggaagacagcgtcgaagaggcg

SEQ ID NO: 5613 - DNA, 22 bp, Artificial Sequence
  Synthetic oligonucleotide
  Mismatch hsa-miR-1273c MIMAT0015017
gacagggtctcactttgtcgcc

SEQ ID NO: 5614 - DNA, 22 bp, Artificial Sequence
  Synthetic oligonucleotide
  Mismatch hsa-miR-7112-5p MIMAT0028121
cagggtgcactatcctgcccgt

SEQ ID NO: 5615 - DNA, 21 bp, Artificial Sequence
  Synthetic oligonucleotide
  Mismatch hsa-miR-5690 MIMAT0022482
cctaatagagacagtagctga

SEQ ID NO: 5616 - DNA, 22 bp, Artificial Sequence
  Synthetic oligonucleotide
  Mismatch hsa-miR-5011-3p MIMAT0021046
tgttatatatattgccatgcac

SEQ ID NO: 5617 - DNA, 22 bp, Artificial Sequence
  Synthetic oligonucleotide
  Mismatch hsa-miR-4431 MIMAT0018947
accttctagttcccagagtcgc

SEQ ID NO: 5618 - DNA, 18 bp, Artificial Sequence
  Synthetic oligonucleotide
  Mismatch hsa-miR-4418 MIMAT0018930
ctgctgaaccctgcagtg

SEQ ID NO: 5619 - DNA, 22 bp, Artificial Sequence
  Synthetic oligonucleotide
  Mismatch hsa-miR-891a-5p MIMAT0004902
tcagtggctcaaattcgttgca

SEQ ID NO: 5620 - DNA, 20 bp, Artificial Sequence
  Synthetic oligonucleotide
  Mismatch hsa-miR-378f MIMAT0018932
cttctggctttaagtccagt

SEQ ID NO: 5621 - DNA, 22 bp, Artificial Sequence
  Synthetic oligonucleotide
  Mismatch hsa-miR-183-3p MIMAT0004560
ttatggccctttagtaattcac

SEQ ID NO: 5622 - DNA, 20 bp, Artificial Sequence
  Synthetic oligonucleotide
  Mismatch hsa-miR-3119 MIMAT0014981
gccatcaaaactaaaagcca

SEQ ID NO: 5623 - DNA, 22 bp, Artificial Sequence
  Synthetic oligonucleotide
  Mismatch hsa-miR-4640-3p MIMAT0019700
gtgggccaggattcagggggtg

SEQ ID NO: 5624 - DNA, 21 bp, Artificial Sequence
  Synthetic oligonucleotide
  Mismatch hsa-miR-3606-3p MIMAT0022965
ctaagtagtgttagaaatttt

SEQ ID NO: 5625 - DNA, 21 bp, Artificial Sequence
  Synthetic oligonucleotide
  Mismatch hsa-miR-106b-5p MIMAT0000680
atctgcactgctagcacttta

SEQ ID NO: 5626 - DNA, 22 bp, Artificial Sequence
  Synthetic oligonucleotide
  Mismatch hsa-miR-4712-5p MIMAT0019818
gaaatgagagatttgtactgga

SEQ ID NO: 5627 - DNA, 22 bp, Artificial Sequence
  Synthetic oligonucleotide
  Mismatch hsa-miR-147b MIMAT0004928
tagcagaagcacctccgcacac

SEQ ID NO: 5628 - DNA, 21 bp, Artificial Sequence
  Synthetic oligonucleotide
  Mismatch hsa-miR-379-5p MIMAT0000733
cctacgttcctcagtctacca

SEQ ID NO: 5629 - DNA, 22 bp, Artificial Sequence
  Synthetic oligonucleotide
  Mismatch hsa-miR-4678 MIMAT0019762
tcataagtctgttcaatacctt

SEQ ID NO: 5630 - DNA, 22 bp, Artificial Sequence
  Synthetic oligonucleotide
  Mismatch hsa-miR-3126-5p MIMAT0014989
tgcttctggcacttgtccctca

SEQ ID NO: 5631 - DNA, 21 bp, Artificial Sequence
  Synthetic oligonucleotide
  Mismatch hsa-miR-6069 MIMAT0023694
gggggcagcaaaccctagccc

SEQ ID NO: 5632 - DNA, 22 bp, Artificial Sequence
  Synthetic oligonucleotide
  Mismatch hsa-miR-1255b-5p MIMAT0005945
aaccactttctccgctcatccg

SEQ ID NO: 5633 - DNA, 21 bp, Artificial Sequence
  Synthetic oligonucleotide
  Mismatch hsa-miR-6715a-3p MIMAT0025841
ccacaggcacatctggtttgg

SEQ ID NO: 5634 - DNA, 17 bp, Artificial Sequence
  Synthetic oligonucleotide
  Mismatch hsa-miR-4276 MIMAT0016904
gcacatatgtcactgag

SEQ ID NO: 5635 - DNA, 21 bp, Artificial Sequence
  Synthetic oligonucleotide
  Mismatch hsa-miR-6812-3p MIMAT0027525
ctggggtcagaagaagagcgg

SEQ ID NO: 5636 - DNA, 21 bp, Artificial Sequence
  Synthetic oligonucleotide
  Mismatch hsa-miR-4680-3p MIMAT0019765
taacaactctctcaattcaga

SEQ ID NO: 5637 - DNA, 22 bp, Artificial Sequence
  Synthetic oligonucleotide
  Mismatch hsa-let-7g-5p MIMAT0000414
aactgtacaaatcactacctca

SEQ ID NO: 5638 - DNA, 22 bp, Artificial Sequence
  Synthetic oligonucleotide
  Mismatch hsa-miR-4757-3p MIMAT0019902
gcgaagcctctacgacgtcatg

SEQ ID NO: 5639 - DNA, 22 bp, Artificial Sequence
  Synthetic oligonucleotide
  Mismatch hsa-miR-4731-3p MIMAT0019854
agtgttgggggttacttgtgtg

SEQ ID NO: 5640 - DNA, 19 bp, Artificial Sequence
  Synthetic oligonucleotide
  Mismatch hsa-miR-4645-5p MIMAT0019705
acaatattctttgcctggt

SEQ ID NO: 5641 - DNA, 17 bp, Artificial Sequence
  Synthetic oligonucleotide
  Mismatch hsa-miR-4304 MIMAT0016854
tgccctaaacatgccgg

SEQ ID NO: 5642 - DNA, 22 bp, Artificial Sequence
  Synthetic oligonucleotide
  Mismatch hsa-miR-4511 MIMAT0019048
agggcaaatgcttcagttcttc

SEQ ID NO: 5643 - DNA, 22 bp, Artificial Sequence
  Synthetic oligonucleotide
  Mismatch hsa-miR-3658 MIMAT0018078
atctccatggtactttcttaaa

SEQ ID NO: 5644 - DNA, 23 bp, Artificial Sequence
  Synthetic oligonucleotide
  Mismatch hsa-miR-197-5p MIMAT0022691
cctcccactgcctcctctacccg

SEQ ID NO: 5645 - DNA, 22 bp, Artificial Sequence
  Synthetic oligonucleotide
  Mismatch hsa-miR-34b-3p MIMAT0004676
atggcagtggaactagtgattg

SEQ ID NO: 5646 - DNA, 22 bp, Artificial Sequence
  Synthetic oligonucleotide
  Mismatch hsa-miR-6846-5p MIMAT0027592
actctaccccactcagccccca

SEQ ID NO: 5647 - DNA, 22 bp, Artificial Sequence
  Synthetic oligonucleotide
  Mismatch hsa-miR-580-5p MIMAT0026617
atctgagtctgtcgaatcatta

SEQ ID NO: 5648 - DNA, 22 bp, Artificial Sequence
  Synthetic oligonucleotide
  Mismatch hsa-miR-519e-5p MIMAT0002828
gaaagtgctcctctttggagaa

SEQ ID NO: 5649 - DNA, 22 bp, Artificial Sequence
  Synthetic oligonucleotide
  Mismatch hsa-miR-6715b-3p MIMAT0025843
ccacaggcacaatcggtttgag

SEQ ID NO: 5650 - DNA, 23 bp, Artificial Sequence
  Synthetic oligonucleotide
  Mismatch hsa-miR-494-5p MIMAT0026607
agagaagacaacttggacaacct

SEQ ID NO: 5651 - DNA, 23 bp, Artificial Sequence
  Synthetic oligonucleotide
  Mismatch hsa-miR-106a-5p MIMAT0000103
ctacctgcactgctagcactttt

SEQ ID NO: 5652 - DNA, 22 bp, Artificial Sequence
  Synthetic oligonucleotide
  Mismatch hsa-miR-4714-5p MIMAT0019822
atcaacctaagaagtcagagtt

SEQ ID NO: 5653 - DNA, 20 bp, Artificial Sequence
  Synthetic oligonucleotide
  Mismatch hsa-miR-599 MIMAT0003267
gtttgataatttgacacaac

SEQ ID NO: 5654 - DNA, 22 bp, Artificial Sequence
  Synthetic oligonucleotide
  Mismatch hsa-miR-5697 MIMAT0022490
cctttatcatgttactacttga

SEQ ID NO: 5655 - DNA, 24 bp, Artificial Sequence
  Synthetic oligonucleotide
  Mismatch hsa-miR-216b-3p MIMAT0026721
tagaatctctacgaataagtgtgt

SEQ ID NO: 5656 - DNA, 23 bp, Artificial Sequence
  Synthetic oligonucleotide
  Mismatch hsa-miR-4682 MIMAT0019767
agaccaggctcctagaactcaga

SEQ ID NO: 5657 - DNA, 24 bp, Artificial Sequence
  Synthetic oligonucleotide
  Mismatch hsa-miR-3692-5p MIMAT0018121
cagtatccactcccaaccagcagg

SEQ ID NO: 5658 - DNA, 18 bp, Artificial Sequence
  Synthetic oligonucleotide
  Mismatch hsa-miR-4519 MIMAT0019056
cagccctatgcactgctg

SEQ ID NO: 5659 - DNA, 23 bp, Artificial Sequence
  Synthetic oligonucleotide
  Mismatch hsa-miR-6801-5p MIMAT0027502
tcatttcctgctatctctgacca

SEQ ID NO: 5660 - DNA, 22 bp, Artificial Sequence
  Synthetic oligonucleotide
  Mismatch hsa-miR-548v MIMAT0015020
tggtgcaaaagctactgtagct

SEQ ID NO: 5661 - DNA, 22 bp, Artificial Sequence
  Synthetic oligonucleotide
  Mismatch hsa-miR-3661 MIMAT0018082
cagctgtccgaaccccaggtca

SEQ ID NO: 5662 - DNA, 18 bp, Artificial Sequence
  Synthetic oligonucleotide
  Mismatch hsa-miR-4791 MIMAT0019963
tttcagttttcatatcca

SEQ ID NO: 5663 - DNA, 23 bp, Artificial Sequence
  Synthetic oligonucleotide
  Mismatch hsa-miR-4638-3p MIMAT0019696
cggccggctgagtagtgtccagg

SEQ ID NO: 5664 - DNA, 22 bp, Artificial Sequence
  Synthetic oligonucleotide
  Mismatch hsa-miR-214-5p MIMAT0004564
gcacagcaagtacagacaggca

SEQ ID NO: 5665 - DNA, 22 bp, Artificial Sequence
  Synthetic oligonucleotide
  Mismatch hsa-miR-513b-3p MIMAT0026749
tcctctcaaaatagtgacattt

SEQ ID NO: 5666 - DNA, 21 bp, Artificial Sequence
  Synthetic oligonucleotide
  Mismatch hsa-miR-6500-3p MIMAT0025455
gcaggtcatcttaacaagtgt

SEQ ID NO: 5667 - DNA, 22 bp, Artificial Sequence
  Synthetic oligonucleotide
  Mismatch hsa-miR-1296-5p MIMAT0005794
ggagatggagcttgggccctaa

SEQ ID NO: 5668 - DNA, 23 bp, Artificial Sequence
  Synthetic oligonucleotide
  Mismatch hsa-miR-635 MIMAT0003305
ggacattgtttctatgcccaagt

SEQ ID NO: 5669 - DNA, 21 bp, Artificial Sequence
  Synthetic oligonucleotide
  Mismatch hsa-miR-6892-5p MIMAT0027684
tcctactctctagtcccttac

SEQ ID NO: 5670 - DNA, 22 bp, Artificial Sequence
  Synthetic oligonucleotide
  Mismatch hsa-miR-328-3p MIMAT0000752
acggaagggcaatgagggccag

SEQ ID NO: 5671 - DNA, 23 bp, Artificial Sequence
  Synthetic oligonucleotide
  Mismatch hsa-miR-372-5p MIMAT0026484
agaatagtgctcttcatttgagg

SEQ ID NO: 5672 - DNA, 24 bp, Artificial Sequence
  Synthetic oligonucleotide
  Mismatch hsa-miR-1291 MIMAT0005881
actgctggtcttctatcagggcca

SEQ ID NO: 5673 - DNA, 21 bp, Artificial Sequence
  Synthetic oligonucleotide
  Mismatch hsa-miR-3912-3p MIMAT0018186
acatgtccattctatgcgtta

SEQ ID NO: 5674 - DNA, 21 bp, Artificial Sequence
  Synthetic oligonucleotide
  Mismatch hsa-miR-190b MIMAT0004929
aacccaatatttaacatatca

SEQ ID NO: 5675 - DNA, 22 bp, Artificial Sequence
  Synthetic oligonucleotide
  Mismatch hsa-miR-4673 MIMAT0019755
tccagtccggcctctgcctgga

SEQ ID NO: 5676 - DNA, 22 bp, Artificial Sequence
  Synthetic oligonucleotide
  Mismatch hsa-miR-885-3p MIMAT0004948
tatccactacattccgctgcct

SEQ ID NO: 5677 - DNA, 21 bp, Artificial Sequence
  Synthetic oligonucleotide
  Mismatch hsa-miR-6075 MIMAT0023700
caccaatgccatctgggccgt

SEQ ID NO: 5678 - DNA, 22 bp, Artificial Sequence
  Synthetic oligonucleotide
  Mismatch hsa-miR-495-5p MIMAT0022924
cgaaaataacacaggcaacttc

SEQ ID NO: 5679 - DNA, 21 bp, Artificial Sequence
  Synthetic oligonucleotide
  Mismatch hsa-miR-4759 MIMAT0019905
taattccaactcctagtccta

SEQ ID NO: 5680 - DNA, 22 bp, Artificial Sequence
  Synthetic oligonucleotide
  Mismatch hsa-miR-141-5p MIMAT0004598
tccaacactgttttggaagatg

SEQ ID NO: 5681 - DNA, 20 bp, Artificial Sequence
  Synthetic oligonucleotide
  Mismatch hsa-miR-4484 MIMAT0019018
tggggcttcctccgcctttt

SEQ ID NO: 5682 - DNA, 22 bp, Artificial Sequence
  Synthetic oligonucleotide
  Mismatch hsa-miR-643 MIMAT0003313
ctacctgagcttacatacaagt

SEQ ID NO: 5683 - DNA, 22 bp, Artificial Sequence
  Synthetic oligonucleotide
  Mismatch hsa-miR-4676-3p MIMAT0019759
aagagccagtgacgaaacagtg

SEQ ID NO: 5684 - DNA, 22 bp, Artificial Sequence
  Synthetic oligonucleotide
  Mismatch hsa-miR-3169 MIMAT0015044
ctatgtgccaaatacagtccta

SEQ ID NO: 5685 - DNA, 22 bp, Artificial Sequence
  Synthetic oligonucleotide
  Mismatch hsa-miR-4735-5p MIMAT0019860
taccgaaggtgcccaaattagg

SEQ ID NO: 5686 - DNA, 22 bp, Artificial Sequence
  Synthetic oligonucleotide
  Mismatch hsa-miR-4756-3p MIMAT0019900
ataggaaggcattcatctctgg

SEQ ID NO: 5687 - DNA, 21 bp, Artificial Sequence
  Synthetic oligonucleotide
  Mismatch hsa-miR-1908-5p MIMAT0007881
gaccaatcgctatccccgccg

SEQ ID NO: 5688 - DNA, 21 bp, Artificial Sequence
  Synthetic oligonucleotide
  Mismatch hsa-miR-2277-3p MIMAT0011777
gagccaggcaaagcgctgtca

SEQ ID NO: 5689 - DNA, 23 bp, Artificial Sequence
  Synthetic oligonucleotide
  Mismatch hsa-miR-3162-5p MIMAT0015036
ctccccaccctttcactccctaa

SEQ ID NO: 5690 - DNA, 21 bp, Artificial Sequence
  Synthetic oligonucleotide
  Mismatch hsa-miR-551b-3p MIMAT0003233
ctgaaaccaaacatgggtcgc

SEQ ID NO: 5691 - DNA, 20 bp, Artificial Sequence
  Synthetic oligonucleotide
  Mismatch hsa-miR-5739 MIMAT0023116
gctccccatcttctctccgc

SEQ ID NO: 5692 - DNA, 21 bp, Artificial Sequence
  Synthetic oligonucleotide
  Mismatch hsa-miR-6893-5p MIMAT0027686
gctccaccctttacctgcctg

SEQ ID NO: 5693 - DNA, 21 bp, Artificial Sequence
  Synthetic oligonucleotide
  Mismatch hsa-miR-548ae-3p MIMAT0018954
tgaaagtaatcacagtttttg

SEQ ID NO: 5694 - DNA, 21 bp, Artificial Sequence
  Synthetic oligonucleotide
  Mismatch hsa-miR-6821-3p MIMAT0027543
ctgtgcggagtagagaggtca

SEQ ID NO: 5695 - DNA, 21 bp, Artificial Sequence
  Synthetic oligonucleotide
  Mismatch hsa-miR-378i MIMAT0019074
ccttctgacttttagtccagt

SEQ ID NO: 5696 - DNA, 22 bp, Artificial Sequence
  Synthetic oligonucleotide
  Mismatch hsa-miR-4539 MIMAT0019082
gcccagctcagttcagttcagc

SEQ ID NO: 5697 - DNA, 23 bp, Artificial Sequence
  Synthetic oligonucleotide
  Mismatch hsa-miR-323b-5p MIMAT0001630
tgcgaactcaccttggacaacct

SEQ ID NO: 5698 - DNA, 20 bp, Artificial Sequence
  Synthetic oligonucleotide
  Mismatch hsa-miR-518a-5p MIMAT0005457
gaaagggctctcctttgcag

SEQ ID NO: 5699 - DNA, 25 bp, Artificial Sequence
  Synthetic oligonucleotide
  Mismatch hsa-miR-608 MIMAT0003276
acggagctgtcccattaccacccct

SEQ ID NO: 5700 - DNA, 23 bp, Artificial Sequence
  Synthetic oligonucleotide
  Mismatch hsa-miR-6514-5p MIMAT0025484
gccagctgaaagctcactccata

SEQ ID NO: 5701 - DNA, 21 bp, Artificial Sequence
  Synthetic oligonucleotide
  Mismatch hsa-miR-3615 MIMAT0017994
gagccgcgagatgccgagaga

SEQ ID NO: 5702 - DNA, 23 bp, Artificial Sequence
  Synthetic oligonucleotide
  Mismatch hsa-miR-770-5p MIMAT0003948
tggccctgacacacggtactgga

SEQ ID NO: 5703 - DNA, 20 bp, Artificial Sequence
  Synthetic oligonucleotide
  Mismatch hsa-miR-3621 MIMAT0018002
cctgcagacttcgacccgcg

SEQ ID NO: 5704 - DNA, 17 bp, Artificial Sequence
  Synthetic oligonucleotide
  Mismatch hsa-miR-4508 MIMAT0019045
cgcgcgttcagccccgc

SEQ ID NO: 5705 - DNA, 22 bp, Artificial Sequence
  Synthetic oligonucleotide
  Mismatch hsa-miR-6839-3p MIMAT0027581
ctggattgaagtaaaaacccaa

SEQ ID NO: 5706 - DNA, 23 bp, Artificial Sequence
  Synthetic oligonucleotide
  Mismatch hsa-miR-4698 MIMAT0019793
tggggtcttccttcacattttga

SEQ ID NO: 5707 - DNA, 22 bp, Artificial Sequence
  Synthetic oligonucleotide
  Mismatch hsa-miR-4521 MIMAT0019058
ctgagcacaggttttccttagc

SEQ ID NO: 5708 - DNA, 21 bp, Artificial Sequence
  Synthetic oligonucleotide
  Mismatch hsa-miR-33a-5p MIMAT0000091
tgcaatgcaatcacaatgcac

SEQ ID NO: 5709 - DNA, 22 bp, Artificial Sequence
  Synthetic oligonucleotide
  Mismatch hsa-miR-1287-5p MIMAT0005878
gactcgaaccatcgatccagca

SEQ ID NO: 5710 - DNA, 19 bp, Artificial Sequence
  Synthetic oligonucleotide
  Mismatch hsa-miR-4650-5p MIMAT0019713
aaggtagattgaggcctga

SEQ ID NO: 5711 - DNA, 22 bp, Artificial Sequence
  Synthetic oligonucleotide
  Mismatch hsa-miR-154-5p MIMAT0000452
cgaaggcaacatagataaccta

SEQ ID NO: 5712 - DNA, 21 bp, Artificial Sequence
  Synthetic oligonucleotide
  Mismatch hsa-miR-6857-3p MIMAT0027615
ctgtggggagttgctcagtca

SEQ ID NO: 5713 - DNA, 22 bp, Artificial Sequence
  Synthetic oligonucleotide
  Mismatch hsa-miR-449b-3p MIMAT0009203
agtggcagggttattgtggctg

SEQ ID NO: 5714 - DNA, 23 bp, Artificial Sequence
  Synthetic oligonucleotide
  Mismatch hsa-miR-3617-3p MIMAT0022966
agaaaggacataaagtgctgatg

SEQ ID NO: 5715 - DNA, 18 bp, Artificial Sequence
  Synthetic oligonucleotide
  Mismatch hsa-miR-4253 MIMAT0016882
accccctaaacatgccct

SEQ ID NO: 5716 - DNA, 22 bp, Artificial Sequence
  Synthetic oligonucleotide
  Mismatch hsa-miR-216b-5p MIMAT0004959
tcacatttgcccacagagattt

SEQ ID NO: 5717 - DNA, 19 bp, Artificial Sequence
  Synthetic oligonucleotide
  Mismatch hsa-miR-6817-3p MIMAT0027535
tgccatggtatcagagaga

SEQ ID NO: 5718 - DNA, 22 bp, Artificial Sequence
  Synthetic oligonucleotide
  Mismatch hsa-miR-1226-3p MIMAT0005577
ctagggaacactaggctggtga

SEQ ID NO: 5719 - DNA, 22 bp, Artificial Sequence
  Synthetic oligonucleotide
  Mismatch hsa-miR-127-3p MIMAT0000446
agccaagctcaatcggatccga

SEQ ID NO: 5720 - DNA, 22 bp, Artificial Sequence
  Synthetic oligonucleotide
  Mismatch hsa-miR-5004-3p MIMAT0021028
ctgaggcccagataaatccaag

SEQ ID NO: 5721 - DNA, 22 bp, Artificial Sequence
  Synthetic oligonucleotide
  Mismatch hsa-miR-2681-5p MIMAT0013515
agtctcctggaaatggtaaaac

SEQ ID NO: 5722 - DNA, 21 bp, Artificial Sequence
  Synthetic oligonucleotide
  Mismatch hsa-miR-23b-3p MIMAT0000418
ggtaatccctaacaatgtgat

SEQ ID NO: 5723 - DNA, 22 bp, Artificial Sequence
  Synthetic oligonucleotide
  Mismatch hsa-miR-3613-5p MIMAT0017990
gaacaaaaaaattagtacaaca

SEQ ID NO: 5724 - DNA, 21 bp, Artificial Sequence
  Synthetic oligonucleotide
  Mismatch hsa-miR-5096 MIMAT0020603
gcctgaccaatttggtgaaac

SEQ ID NO: 5725 - DNA, 23 bp, Artificial Sequence
  Synthetic oligonucleotide
  Mismatch hsa-miR-3614-5p MIMAT0017992
gggcagccttcaattccaagtgg

SEQ ID NO: 5726 - DNA, 21 bp, Artificial Sequence
  Synthetic oligonucleotide
  Mismatch hsa-miR-6779-3p MIMAT0027459
agatgggaggtaacagggctt

SEQ ID NO: 5727 - DNA, 21 bp, Artificial Sequence
  Synthetic oligonucleotide
  Mismatch hsa-miR-718 MIMAT0012735
cgacgcccggtagggcggaag

SEQ ID NO: 5728 - DNA, 21 bp, Artificial Sequence
  Synthetic oligonucleotide
  Mismatch hsa-miR-4718 MIMAT0019831
tgcttggtttttggtacagct

SEQ ID NO: 5729 - DNA, 22 bp, Artificial Sequence
  Synthetic oligonucleotide
  Mismatch hsa-miR-98-3p MIMAT0022842
gggaaagtagtttgttgtatag

SEQ ID NO: 5730 - DNA, 23 bp, Artificial Sequence
  Synthetic oligonucleotide
  Mismatch hsa-miR-325 MIMAT0000771
acacttactggattcctactagg

SEQ ID NO: 5731 - DNA, 21 bp, Artificial Sequence
  Synthetic oligonucleotide
  Mismatch hsa-miR-6795-3p MIMAT0027491
ctgggggaagttacgaggggt

SEQ ID NO: 5732 - DNA, 22 bp, Artificial Sequence
  Synthetic oligonucleotide
  Mismatch hsa-miR-5195-5p MIMAT0021126
ccatccagttgttttaggggtt

SEQ ID NO: 5733 - DNA, 22 bp, Artificial Sequence
  Synthetic oligonucleotide
  Mismatch hsa-miR-6501-5p MIMAT0025458
accaaaggcagttctggcaact

SEQ ID NO: 5734 - DNA, 20 bp, Artificial Sequence
  Synthetic oligonucleotide
  Mismatch hsa-miR-4520-5p MIMAT0019235
ttggacagattacacgcagg

SEQ ID NO: 5735 - DNA, 21 bp, Artificial Sequence
  Synthetic oligonucleotide
  Mismatch hsa-miR-4774-3p MIMAT0019930
ttctggcacacattaggcaat

SEQ ID NO: 5736 - DNA, 18 bp, Artificial Sequence
  Synthetic oligonucleotide
  Mismatch hsa-miR-4323 MIMAT0016875
tctgaggtcgtggggctg

SEQ ID NO: 5737 - DNA, 22 bp, Artificial Sequence
  Synthetic oligonucleotide
  Mismatch hsa-miR-4750-3p MIMAT0022979
ctgcgggagggaatgggtcagg

SEQ ID NO: 5738 - DNA, 23 bp, Artificial Sequence
  Synthetic oligonucleotide
  Mismatch hsa-miR-4665-5p MIMAT0019739
gctcgcgctcacatgtcccccag

SEQ ID NO: 5739 - DNA, 23 bp, Artificial Sequence
  Synthetic oligonucleotide
  Mismatch hsa-miR-302a-3p MIMAT0000684
tcaccaaaacataaaagcactta

SEQ ID NO: 5740 - DNA, 21 bp, Artificial Sequence
  Synthetic oligonucleotide
  Mismatch hsa-miR-6790-3p MIMAT0027481
agtgaggggttaccgaggtcg

SEQ ID NO: 5741 - DNA, 22 bp, Artificial Sequence
  Synthetic oligonucleotide
  Mismatch hsa-miR-148b-5p MIMAT0004699
gcctgagtgtactacagaactt

SEQ ID NO: 5742 - DNA, 22 bp, Artificial Sequence
  Synthetic oligonucleotide
  Mismatch hsa-miR-3129-5p MIMAT0014992
aaaccaatctcctcactactgc

SEQ ID NO: 5743 - DNA, 18 bp, Artificial Sequence
  Synthetic oligonucleotide
  Mismatch hsa-miR-4299 MIMAT0016851
gcctctctcgtcaccagc

SEQ ID NO: 5744 - DNA, 22 bp, Artificial Sequence
  Synthetic oligonucleotide
  Mismatch hsa-miR-3972 MIMAT0019357
tgccctggaacaaggctggcag

SEQ ID NO: 5745 - DNA, 23 bp, Artificial Sequence
  Synthetic oligonucleotide
  Mismatch hsa-miR-5197-5p MIMAT0021130
tcaagaatgagtccgtgccattg

SEQ ID NO: 5746 - DNA, 22 bp, Artificial Sequence
  Synthetic oligonucleotide
  Mismatch hsa-miR-1343-5p MIMAT0027038
cccacccggggatcgctcccca

SEQ ID NO: 5747 - DNA, 20 bp, Artificial Sequence
  Synthetic oligonucleotide
  Mismatch hsa-miR-3960 MIMAT0019337
cccccgcctttgccgccgcc

SEQ ID NO: 5748 - DNA, 17 bp, Artificial Sequence
  Synthetic oligonucleotide
  Mismatch hsa-miR-4303 MIMAT0016856
ctgtccctagctcagaa

SEQ ID NO: 5749 - DNA, 24 bp, Artificial Sequence
  Synthetic oligonucleotide
  Mismatch hsa-miR-3132 MIMAT0014997
tcctctgagctccccctctaccca

SEQ ID NO: 5750 - DNA, 21 bp, Artificial Sequence
  Synthetic oligonucleotide
  Mismatch hsa-miR-31-5p MIMAT0000089
agctatgccaatatcttgcct

SEQ ID NO: 5751 - DNA, 22 bp, Artificial Sequence
  Synthetic oligonucleotide
  Mismatch hsa-miR-541-3p MIMAT0004920
agtccagattccatgcccacca

SEQ ID NO: 5752 - DNA, 21 bp, Artificial Sequence
  Synthetic oligonucleotide
  Mismatch hsa-miR-518f-3p MIMAT0002842
cctctaaagaatagcgctttc

SEQ ID NO: 5753 - DNA, 22 bp, Artificial Sequence
  Synthetic oligonucleotide
  Mismatch hsa-miR-6825-3p MIMAT0027551
tgcggagaaggtaggtcagcgc

SEQ ID NO: 5754 - DNA, 21 bp, Artificial Sequence
  Synthetic oligonucleotide
  Mismatch hsa-miR-126-5p MIMAT0000444
cgcgtaccaattgtaataatg

SEQ ID NO: 5755 - DNA, 21 bp, Artificial Sequence
  Synthetic oligonucleotide
  Mismatch hsa-miR-6770-3p MIMAT0027441
ctgtgaagacttagccgccag

SEQ ID NO: 5756 - DNA, 22 bp, Artificial Sequence
  Synthetic oligonucleotide
  Mismatch hsa-miR-4420 MIMAT0018933
ctcagctacagttatcagtgac

SEQ ID NO: 5757 - DNA, 21 bp, Artificial Sequence
  Synthetic oligonucleotide
  Mismatch hsa-miR-1258 MIMAT0005909
ttccacgaccctatcctaact

SEQ ID NO: 5758 - DNA, 21 bp, Artificial Sequence
  Synthetic oligonucleotide
  Mismatch hsa-miR-488-5p MIMAT0002804
ttgagagtgcttttatctggg

SEQ ID NO: 5759 - DNA, 24 bp, Artificial Sequence
  Synthetic oligonucleotide
  Mismatch hsa-miR-3138 MIMAT0015006
actccctctacctttctgtccaca

SEQ ID NO: 5760 - DNA, 22 bp, Artificial Sequence
  Synthetic oligonucleotide
  Mismatch hsa-miR-4662b MIMAT0019736
atttagccaatcatccatcttt

SEQ ID NO: 5761 - DNA, 22 bp, Artificial Sequence
  Synthetic oligonucleotide
  Mismatch hsa-miR-6881-3p MIMAT0027663
agtgggaaggataaaagaggat

SEQ ID NO: 5762 - DNA, 22 bp, Artificial Sequence
  Synthetic oligonucleotide
  Mismatch hsa-miR-3142 MIMAT0015011
tctgaaggttctaaaaggcctt

SEQ ID NO: 5763 - DNA, 21 bp, Artificial Sequence
  Synthetic oligonucleotide
  Mismatch hsa-miR-6775-3p MIMAT0027451
ctggggcagaaaacagggcct

SEQ ID NO: 5764 - DNA, 24 bp, Artificial Sequence
  Synthetic oligonucleotide
  Mismatch hsa-miR-6864-5p MIMAT0027628
ggcatatctgactcatcccttcaa

SEQ ID NO: 5765 - DNA, 23 bp, Artificial Sequence
  Synthetic oligonucleotide
  Mismatch hsa-miR-6721-5p MIMAT0025852
ctcctacaataaatccctgccca

SEQ ID NO: 5766 - DNA, 23 bp, Artificial Sequence
  Synthetic oligonucleotide
  Mismatch hsa-miR-6782-3p MIMAT0027465
tgcaggatggggttacaaaggtg

SEQ ID NO: 5767 - DNA, 20 bp, Artificial Sequence
  Synthetic oligonucleotide
  Mismatch hsa-miR-7106-5p MIMAT0028109
cccaagatcttctcctccca

SEQ ID NO: 5768 - DNA, 23 bp, Artificial Sequence
  Synthetic oligonucleotide
  Mismatch hsa-miR-139-3p MIMAT0004552
actccaacagggttgcgtctcca

SEQ ID NO: 5769 - DNA, 21 bp, Artificial Sequence
  Synthetic oligonucleotide
  Mismatch hsa-miR-554 MIMAT0003217
actggctgagctaggactagc

SEQ ID NO: 5770 - DNA, 22 bp, Artificial Sequence
  Synthetic oligonucleotide
  Mismatch hsa-miR-491-3p MIMAT0004765
gtagaagggaactttgcataag

SEQ ID NO: 5771 - DNA, 22 bp, Artificial Sequence
  Synthetic oligonucleotide
  Mismatch hsa-miR-4778-3p MIMAT0019937
tcaactctgcattggaagaaga

SEQ ID NO: 5772 - DNA, 22 bp, Artificial Sequence
  Synthetic oligonucleotide
  Mismatch hsa-miR-4659a-5p MIMAT0019726
gttttcttctttaacatggcag

SEQ ID NO: 5773 - DNA, 24 bp, Artificial Sequence
  Synthetic oligonucleotide
  Mismatch hsa-miR-6882-3p MIMAT0027665
ctgcaggcaagagatgaggcagca

SEQ ID NO: 5774 - DNA, 16 bp, Artificial Sequence
  Synthetic oligonucleotide
  Mismatch hsa-miR-4261 MIMAT0016890
tgggtttctgtttcct

SEQ ID NO: 5775 - DNA, 22 bp, Artificial Sequence
  Synthetic oligonucleotide
  Mismatch hsa-miR-6754-5p MIMAT0027408
tcctccaaacctacctccctgg

SEQ ID NO: 5776 - DNA, 21 bp, Artificial Sequence
  Synthetic oligonucleotide
  Mismatch hsa-miR-376c-3p MIMAT0000720
acgtggaattctctctatgtt

SEQ ID NO: 5777 - DNA, 22 bp, Artificial Sequence
  Synthetic oligonucleotide
  Mismatch hsa-miR-6826-3p MIMAT0027553
ctgaacaggaataagaggggag

SEQ ID NO: 5778 - DNA, 21 bp, Artificial Sequence
  Synthetic oligonucleotide
  Mismatch hsa-miR-6867-3p MIMAT0027635
ctagtgggtattgagggagag

SEQ ID NO: 5779 - DNA, 22 bp, Artificial Sequence
  Synthetic oligonucleotide
  Mismatch hsa-miR-30b-5p MIMAT0000420
agctgagtgtaaaatgtttaca

SEQ ID NO: 5780 - DNA, 22 bp, Artificial Sequence
  Synthetic oligonucleotide
  Mismatch hsa-miR-5687 MIMAT0022478
atttgaccctattacgttctaa

SEQ ID NO: 5781 - DNA, 22 bp, Artificial Sequence
  Synthetic oligonucleotide
  Mismatch hsa-miR-9-3p MIMAT0000442
actttcggttacttagctttat

SEQ ID NO: 5782 - DNA, 22 bp, Artificial Sequence
  Synthetic oligonucleotide
  Mismatch hsa-miR-6858-3p MIMAT0027617
aggggtgagcaaaggctggctg

SEQ ID NO: 5783 - DNA, 22 bp, Artificial Sequence
  Synthetic oligonucleotide
  Mismatch hsa-miR-4697-5p MIMAT0019791
cacgtcagtgatcgcgccccct

SEQ ID NO: 5784 - DNA, 22 bp, Artificial Sequence
  Synthetic oligonucleotide
  Mismatch hsa-miR-2681-3p MIMAT0013516
gtgctttaccatttccatgata

SEQ ID NO: 5785 - DNA, 21 bp, Artificial Sequence
  Synthetic oligonucleotide
  Mismatch hsa-miR-3684 MIMAT0018112
aaggacgtgttttaggtctaa

SEQ ID NO: 5786 - DNA, 22 bp, Artificial Sequence
  Synthetic oligonucleotide
  Mismatch hsa-miR-634 MIMAT0003304
gtccaaagttgaagtgctggtt

SEQ ID NO: 5787 - DNA, 22 bp, Artificial Sequence
  Synthetic oligonucleotide
  Mismatch hsa-miR-208a-5p MIMAT0026474
gtataacccggatcaaaagctc

SEQ ID NO: 5788 - DNA, 23 bp, Artificial Sequence
  Synthetic oligonucleotide
  Mismatch hsa-miR-567 MIMAT0003231
gttctgtcctggttgaacatact

SEQ ID NO: 5789 - DNA, 23 bp, Artificial Sequence
  Synthetic oligonucleotide
  Mismatch hsa-miR-3191-3p MIMAT0015075
ctgtctggccagtcacgtcccca

SEQ ID NO: 5790 - DNA, 21 bp, Artificial Sequence
  Synthetic oligonucleotide
  Mismatch hsa-miR-4524b-5p MIMAT0022255
gagacaggctcttgctgctat

SEQ ID NO: 5791 - DNA, 21 bp, Artificial Sequence
  Synthetic oligonucleotide
  Mismatch hsa-miR-6726-5p MIMAT0027353
acctgcagacttcagctcccg

SEQ ID NO: 5792 - DNA, 22 bp, Artificial Sequence
  Synthetic oligonucleotide
  Mismatch hsa-miR-6797-3p MIMAT0027495
gtggggagggataggtcatgca

SEQ ID NO: 5793 - DNA, 20 bp, Artificial Sequence
  Synthetic oligonucleotide
  Mismatch hsa-miR-2052 MIMAT0009977
acattactgccatcaaaaca

SEQ ID NO: 5794 - DNA, 22 bp, Artificial Sequence
  Synthetic oligonucleotide
  Mismatch hsa-miR-1914-5p MIMAT0007889
cagaagtgggctaggcacaggg

SEQ ID NO: 5795 - DNA, 22 bp, Artificial Sequence
  Synthetic oligonucleotide
  Mismatch hsa-miR-330-5p MIMAT0004693
gcctaagacactagcccagaga

SEQ ID NO: 5796 - DNA, 23 bp, Artificial Sequence
  Synthetic oligonucleotide
  Mismatch hsa-miR-3197 MIMAT0015082
cgcctttccgagtttgcgcctcc

SEQ ID NO: 5797 - DNA, 23 bp, Artificial Sequence
  Synthetic oligonucleotide
  Mismatch hsa-miR-139-5p MIMAT0000250
actggagacacgcacactgtaga

SEQ ID NO: 5798 - DNA, 21 bp, Artificial Sequence
  Synthetic oligonucleotide
  Mismatch hsa-miR-6761-5p MIMAT0027422
ctgccatcgaattctctcaga

SEQ ID NO: 5799 - DNA, 23 bp, Artificial Sequence
  Synthetic oligonucleotide
  Mismatch hsa-miR-941 MIMAT0004984
gcacatgtgcacttagccgggtg

SEQ ID NO: 5800 - DNA, 21 bp, Artificial Sequence
  Synthetic oligonucleotide
  Mismatch hsa-miR-4795-5p MIMAT0019968
tcaatattatctgccacttct

SEQ ID NO: 5801 - DNA, 21 bp, Artificial Sequence
  Synthetic oligonucleotide
  Mismatch hsa-miR-181b-3p MIMAT0022692
ttgcattcatcattcagtgag

SEQ ID NO: 5802 - DNA, 22 bp, Artificial Sequence
  Synthetic oligonucleotide
  Mismatch hsa-miR-301a-5p MIMAT0022696
agtagtgcaatttagtcagagc

SEQ ID NO: 5803 - DNA, 21 bp, Artificial Sequence
  Synthetic oligonucleotide
  Mismatch hsa-miR-5047 MIMAT0020541
accttacaactacagctgcaa

SEQ ID NO: 5804 - DNA, 19 bp, Artificial Sequence
  Synthetic oligonucleotide
  Mismatch hsa-miR-548ap-3p MIMAT0021038
aaaagtaaccgtggttttt

SEQ ID NO: 5805 - DNA, 21 bp, Artificial Sequence
  Synthetic oligonucleotide
  Mismatch hsa-miR-571 MIMAT0003236
ctcactcagacagccaactca

SEQ ID NO: 5806 - DNA, 23 bp, Artificial Sequence
  Synthetic oligonucleotide
  Mismatch hsa-miR-492 MIMAT0002812
aagaatcttgtcttgcaggtcct

SEQ ID NO: 5807 - DNA, 22 bp, Artificial Sequence
  Synthetic oligonucleotide
  Mismatch hsa-miR-6855-3p MIMAT0027611
ctgtggggttgttggtcagtct

SEQ ID NO: 5808 - DNA, 22 bp, Artificial Sequence
  Synthetic oligonucleotide
  Mismatch hsa-miR-340-3p MIMAT0000750
gctataaagtatttgagacgga

SEQ ID NO: 5809 - DNA, 22 bp, Artificial Sequence
  Synthetic oligonucleotide
  Mismatch hsa-miR-3160-3p MIMAT0015034
tgggctttctaacctcagctct

SEQ ID NO: 5810 - DNA, 23 bp, Artificial Sequence
  Synthetic oligonucleotide
  Mismatch hsa-miR-4742-5p MIMAT0019872
tctgtaaatatctttttgcctga

SEQ ID NO: 5811 - DNA, 22 bp, Artificial Sequence
  Synthetic oligonucleotide
  Mismatch hsa-miR-4446-5p MIMAT0019233
gccaagggaataacagggaaat

SEQ ID NO: 5812 - DNA, 22 bp, Artificial Sequence
  Synthetic oligonucleotide
  Mismatch hsa-miR-126-3p MIMAT0000445
cgcattattacctacggtacga

SEQ ID NO: 5813 - DNA, 22 bp, Artificial Sequence
  Synthetic oligonucleotide
  Mismatch hsa-miR-451a MIMAT0001631
aactcagtaataataacggttt

SEQ ID NO: 5814 - DNA, 21 bp, Artificial Sequence
  Synthetic oligonucleotide
  Mismatch hsa-miR-548ag MIMAT0018969
gcagaaaccattattaccttt

SEQ ID NO: 5815 - DNA, 22 bp, Artificial Sequence
  Synthetic oligonucleotide
  Mismatch hsa-miR-3194-3p MIMAT0019218
actgccagtgaatagcagagct

SEQ ID NO: 5816 - DNA, 24 bp, Artificial Sequence
  Synthetic oligonucleotide
  Mismatch hsa-miR-8076 MIMAT0031003
cattgtatcagaattgtccatata

SEQ ID NO: 5817 - DNA, 23 bp, Artificial Sequence
  Synthetic oligonucleotide
  Mismatch hsa-miR-7151-5p MIMAT0028212
gccaatacaggctaagatggatc

SEQ ID NO: 5818 - DNA, 22 bp, Artificial Sequence
  Synthetic oligonucleotide
  Mismatch hsa-miR-4709-5p MIMAT0019811
ttggagagcaaaccactgttgt

SEQ ID NO: 5819 - DNA, 24 bp, Artificial Sequence
  Synthetic oligonucleotide
  Mismatch hsa-miR-2277-5p MIMAT0017352
gactggcagcgctttgcccgcgct

SEQ ID NO: 5820 - DNA, 22 bp, Artificial Sequence
  Synthetic oligonucleotide
  Mismatch hsa-miR-526a MIMAT0002845
cagaaagtgctctcctctagag

SEQ ID NO: 5821 - DNA, 20 bp, Artificial Sequence
  Synthetic oligonucleotide
  Mismatch hsa-miR-6784-5p MIMAT0027468
ccctcacccttagccccggc

SEQ ID NO: 5822 - DNA, 22 bp, Artificial Sequence
  Synthetic oligonucleotide
  Mismatch hsa-miR-4476 MIMAT0019003
gcctgtccctatttccttcctg

SEQ ID NO: 5823 - DNA, 20 bp, Artificial Sequence
  Synthetic oligonucleotide
  Mismatch hsa-miR-3125 MIMAT0014988
tctctccactacttcctcta

SEQ ID NO: 5824 - DNA, 22 bp, Artificial Sequence
  Synthetic oligonucleotide
  Mismatch hsa-miR-4498 MIMAT0019033
cagcacttgcctcgccagccca

SEQ ID NO: 5825 - DNA, 23 bp, Artificial Sequence
  Synthetic oligonucleotide
  Mismatch hsa-miR-103a-3p MIMAT0000101
tcatagccctgtttaatgctgct

SEQ ID NO: 5826 - DNA, 18 bp, Artificial Sequence
  Synthetic oligonucleotide
  Mismatch hsa-miR-4472 MIMAT0018999
aaaacaattccccccacc

SEQ ID NO: 5827 - DNA, 22 bp, Artificial Sequence
  Synthetic oligonucleotide
  Mismatch hsa-let-7i-3p MIMAT0004585
agcaaggcagttacttgcgcag

SEQ ID NO: 5828 - DNA, 22 bp, Artificial Sequence
  Synthetic oligonucleotide
  Mismatch hsa-miR-5702 MIMAT0022495
catgggatatgccgctgactca

SEQ ID NO: 5829 - DNA, 23 bp, Artificial Sequence
  Synthetic oligonucleotide
  Mismatch hsa-miR-199b-5p MIMAT0000263
gaacagatagtcctaacactggg

SEQ ID NO: 5830 - DNA, 19 bp, Artificial Sequence
  Synthetic oligonucleotide
  Mismatch hsa-miR-383-3p MIMAT0026485
tctgaccaaacagtgctgt

SEQ ID NO: 5831 - DNA, 22 bp, Artificial Sequence
  Synthetic oligonucleotide
  Mismatch hsa-miR-4696 MIMAT0019790
agatgacagtactcgtcttgca

SEQ ID NO: 5832 - DNA, 21 bp, Artificial Sequence
  Synthetic oligonucleotide
  Mismatch hsa-miR-8062 MIMAT0030989
gcaataatccctaaatcactg

SEQ ID NO: 5833 - DNA, 21 bp, Artificial Sequence
  Synthetic oligonucleotide
  Mismatch hsa-miR-518e-3p MIMAT0002861
cactctgaagaaaagcgcttt

SEQ ID NO: 5834 - DNA, 21 bp, Artificial Sequence
  Synthetic oligonucleotide
  Mismatch hsa-miR-7114-5p MIMAT0028125
acaggcacccttctccacaga

SEQ ID NO: 5835 - DNA, 23 bp, Artificial Sequence
  Synthetic oligonucleotide
  Mismatch hsa-miR-6821-5p MIMAT0027542
ccccgcctcgagttaccacgcac

SEQ ID NO: 5836 - DNA, 21 bp, Artificial Sequence
  Synthetic oligonucleotide
  Mismatch hsa-miR-6879-3p MIMAT0027659
ctgggcaaggtacgggtgaca

SEQ ID NO: 5837 - DNA, 22 bp, Artificial Sequence
  Synthetic oligonucleotide
  Mismatch hsa-miR-5580-5p MIMAT0022273
acacatatgaatcgagccagca

SEQ ID NO: 5838 - DNA, 20 bp, Artificial Sequence
  Synthetic oligonucleotide
  Mismatch hsa-miR-8079 MIMAT0031006
gccagcagaatcgatcactg

SEQ ID NO: 5839 - DNA, 20 bp, Artificial Sequence
  Synthetic oligonucleotide
  Mismatch hsa-miR-527 MIMAT0002862
gaaagggctctcctttgcag

SEQ ID NO: 5840 - DNA, 22 bp, Artificial Sequence
  Synthetic oligonucleotide
  Mismatch hsa-miR-450a-1-3p MIMAT0022700
atacatgcaaatcgttcccaat

SEQ ID NO: 5841 - DNA, 17 bp, Artificial Sequence
  Synthetic oligonucleotide
  Mismatch hsa-miR-4499 MIMAT0019035
tccctctcctcagtctt

SEQ ID NO: 5842 - DNA, 21 bp, Artificial Sequence
  Synthetic oligonucleotide
  Mismatch hsa-miR-4781-5p MIMAT0019942
ccaatattggtttccccgcta

SEQ ID NO: 5843 - DNA, 18 bp, Artificial Sequence
  Synthetic oligonucleotide
  Mismatch hsa-miR-1321 MIMAT0005952
atcacatctacctccctg

SEQ ID NO: 5844 - DNA, 19 bp, Artificial Sequence
  Synthetic oligonucleotide
  Mismatch hsa-miR-585-3p MIMAT0003250
tagcatactaatacgccca

SEQ ID NO: 5845 - DNA, 18 bp, Artificial Sequence
  Synthetic oligonucleotide
  Mismatch hsa-miR-4305 MIMAT0016857
gaactggtagtgtctagg

SEQ ID NO: 5846 - DNA, 22 bp, Artificial Sequence
  Synthetic oligonucleotide
  Mismatch hsa-miR-2276-5p MIMAT0026921
cgtctgcaaggcaacagagggc

SEQ ID NO: 5847 - DNA, 22 bp, Artificial Sequence
  Synthetic oligonucleotide
  Mismatch hsa-miR-329-3p MIMAT0001629
aaagaggttaattaggtgtgtt

SEQ ID NO: 5848 - DNA, 22 bp, Artificial Sequence
  Synthetic oligonucleotide
  Mismatch hsa-miR-1915-5p MIMAT0007891
ggcccgggcagttaggcaaggt

SEQ ID NO: 5849 - DNA, 21 bp, Artificial Sequence
  Synthetic oligonucleotide
  Mismatch hsa-miR-224-5p MIMAT0000281
aacggaaccatcagtgacttg

SEQ ID NO: 5850 - DNA, 22 bp, Artificial Sequence
  Synthetic oligonucleotide
  Mismatch hsa-miR-6840-3p MIMAT0027583
caccccgcacattgtcctgggc

SEQ ID NO: 5851 - DNA, 22 bp, Artificial Sequence
  Synthetic oligonucleotide
  Mismatch hsa-miR-6072 MIMAT0023697
ctaaggtgcagcatgatgagga

SEQ ID NO: 5852 - DNA, 24 bp, Artificial Sequence
  Synthetic oligonucleotide
  Mismatch hsa-miR-6079 MIMAT0023704
cagctagttggtcttagcttccaa

SEQ ID NO: 5853 - DNA, 24 bp, Artificial Sequence
  Synthetic oligonucleotide
  Mismatch hsa-miR-6511b-5p MIMAT0025847
tgtcagccccactcttgcctgcag

SEQ ID NO: 5854 - DNA, 22 bp, Artificial Sequence
  Synthetic oligonucleotide
  Mismatch hsa-miR-548ax MIMAT0022474
tggcaaaaccgttattacttct

SEQ ID NO: 5855 - DNA, 20 bp, Artificial Sequence
  Synthetic oligonucleotide
  Mismatch hsa-miR-144-3p MIMAT0000436
agtacatcacttatactgta

SEQ ID NO: 5856 - DNA, 22 bp, Artificial Sequence
  Synthetic oligonucleotide
  Mismatch hsa-miR-4700-5p MIMAT0019796
acacactgtccctatccccaga

SEQ ID NO: 5857 - DNA, 17 bp, Artificial Sequence
  Synthetic oligonucleotide
  Mismatch hsa-miR-4442 MIMAT0018960
cctcccctttgtccggc

SEQ ID NO: 5858 - DNA, 23 bp, Artificial Sequence
  Synthetic oligonucleotide
  Mismatch hsa-miR-3945 MIMAT0018361
atatcaaccctcctctatgccct

SEQ ID NO: 5859 - DNA, 22 bp, Artificial Sequence
  Synthetic oligonucleotide
  Mismatch hsa-miR-4713-5p MIMAT0019820
tgggagcctggctgtgggagaa

SEQ ID NO: 5860 - DNA, 22 bp, Artificial Sequence
  Synthetic oligonucleotide
  Mismatch hsa-miR-520h MIMAT0002867
actctaaagggttgcactttgt

SEQ ID NO: 5861 - DNA, 23 bp, Artificial Sequence
  Synthetic oligonucleotide
  Mismatch hsa-miR-3616-3p MIMAT0017996
gcctgcatcatgttatgccctcg

SEQ ID NO: 5862 - DNA, 21 bp, Artificial Sequence
  Synthetic oligonucleotide
  Mismatch hsa-miR-499a-5p MIMAT0002870
aaacatcactataagtcttaa

SEQ ID NO: 5863 - DNA, 17 bp, Artificial Sequence
  Synthetic oligonucleotide
  Mismatch hsa-miR-4532 MIMAT0019071
cgccggattccccgggg

SEQ ID NO: 5864 - DNA, 18 bp, Artificial Sequence
  Synthetic oligonucleotide
  Mismatch hsa-miR-4311 MIMAT0016863
cacactctactctctttc

SEQ ID NO: 5865 - DNA, 18 bp, Artificial Sequence
  Synthetic oligonucleotide
  Mismatch hsa-miR-4514 MIMAT0019051
ttccccatccctgcctgt

SEQ ID NO: 5866 - DNA, 22 bp, Artificial Sequence
  Synthetic oligonucleotide
  Mismatch hsa-miR-374a-3p MIMAT0004688
aattacaatactttctgataag

SEQ ID NO: 5867 - DNA, 22 bp, Artificial Sequence
  Synthetic oligonucleotide
  Mismatch hsa-miR-141-3p MIMAT0000432
ccatctttacctaacagtgtta

SEQ ID NO: 5868 - DNA, 24 bp, Artificial Sequence
  Synthetic oligonucleotide
  Mismatch hsa-miR-6856-5p MIMAT0027612
ccacagcaccactattcctctctt

SEQ ID NO: 5869 - DNA, 22 bp, Artificial Sequence
  Synthetic oligonucleotide
  Mismatch hsa-miR-186-5p MIMAT0000456
agcccaaaaggtaaattctttg

SEQ ID NO: 5870 - DNA, 23 bp, Artificial Sequence
  Synthetic oligonucleotide
  Mismatch hsa-miR-339-5p MIMAT0000764
cgtgagctcctgatggacaggga

SEQ ID NO: 5871 - DNA, 22 bp, Artificial Sequence
  Synthetic oligonucleotide
  Mismatch hsa-miR-486-5p MIMAT0002177
ctcggggcagcctagtacagga

SEQ ID NO: 5872 - DNA, 21 bp, Artificial Sequence
  Synthetic oligonucleotide
  Mismatch hsa-miR-3927-5p MIMAT0022970
acaggcagattcgtgataggc

SEQ ID NO: 5873 - DNA, 18 bp, Artificial Sequence
  Synthetic oligonucleotide
  Mismatch hsa-miR-7515 MIMAT0029310
gtcaccactttcccttct

SEQ ID NO: 5874 - DNA, 22 bp, Artificial Sequence
  Synthetic oligonucleotide
  Mismatch hsa-miR-548j-5p MIMAT0005875
accaaagaccgttattactttt

SEQ ID NO: 5875 - DNA, 21 bp, Artificial Sequence
  Synthetic oligonucleotide
  Mismatch hsa-miR-548ay-5p MIMAT0025452
gcaaaaaccattattactttt

SEQ ID NO: 5876 - DNA, 22 bp, Artificial Sequence
  Synthetic oligonucleotide
  Mismatch hsa-miR-3936 MIMAT0018351
tgcatctgccactcacccctta

SEQ ID NO: 5877 - DNA, 18 bp, Artificial Sequence
  Synthetic oligonucleotide
  Mismatch hsa-miR-4320 MIMAT0016871
aggaagcctcagaatccc

SEQ ID NO: 5878 - DNA, 22 bp, Artificial Sequence
  Synthetic oligonucleotide
  Mismatch hsa-miR-4782-3p MIMAT0019945
gttctagatatatagacaatca

SEQ ID NO: 5879 - DNA, 21 bp, Artificial Sequence
  Synthetic oligonucleotide
  Mismatch hsa-miR-1273h-5p MIMAT0030415
actgcagcctcaacctcccag

SEQ ID NO: 5880 - DNA, 21 bp, Artificial Sequence
  Synthetic oligonucleotide
  Mismatch hsa-miR-6823-3p MIMAT0027547
ctggagggaaaaagaggctca

SEQ ID NO: 5881 - DNA, 20 bp, Artificial Sequence
  Synthetic oligonucleotide
  Mismatch hsa-miR-3117-5p MIMAT0019197
atatgactcacatagtgtct

SEQ ID NO: 5882 - DNA, 21 bp, Artificial Sequence
  Synthetic oligonucleotide
  Mismatch hsa-miR-218-5p MIMAT0000275
acatggttagtccaagcacaa

SEQ ID NO: 5883 - DNA, 22 bp, Artificial Sequence
  Synthetic oligonucleotide
  Mismatch hsa-miR-663b MIMAT0005867
cctcaggcacgatcgggccacc

SEQ ID NO: 5884 - DNA, 17 bp, Artificial Sequence
  Synthetic oligonucleotide
  Mismatch hsa-miR-1279 MIMAT0005937
agaaagttgcaatatga

SEQ ID NO: 5885 - DNA, 23 bp, Artificial Sequence
  Synthetic oligonucleotide
  Mismatch hsa-miR-4656 MIMAT0019723
acaggcctcctgttctcagccca

SEQ ID NO: 5886 - DNA, 23 bp, Artificial Sequence
  Synthetic oligonucleotide
  Mismatch hsa-miR-135a-5p MIMAT0000428
tcacataggaatttaaagccata

SEQ ID NO: 5887 - DNA, 23 bp, Artificial Sequence
  Synthetic oligonucleotide
  Mismatch hsa-miR-3922-5p MIMAT0019227
tgctgtgggacccttggccttga

SEQ ID NO: 5888 - DNA, 22 bp, Artificial Sequence
  Synthetic oligonucleotide
  Mismatch hsa-miR-3186-5p MIMAT0015067
aagccacgtagttagacgcctg

SEQ ID NO: 5889 - DNA, 22 bp, Artificial Sequence
  Synthetic oligonucleotide
  Mismatch hsa-miR-6785-5p MIMAT0027470
caccatcatccttgccctccca

SEQ ID NO: 5890 - DNA, 22 bp, Artificial Sequence
  Synthetic oligonucleotide
  Mismatch hsa-miR-6723-5p MIMAT0025855
gccccgacgtttttcggactat

SEQ ID NO: 5891 - DNA, 23 bp, Artificial Sequence
  Synthetic oligonucleotide
  Mismatch hsa-miR-2053 MIMAT0009978
gtaaatagaggtccaattaacac

SEQ ID NO: 5892 - DNA, 20 bp, Artificial Sequence
  Synthetic oligonucleotide
  Mismatch hsa-miR-1587 MIMAT0019077
cccaacccaatccagcccaa

SEQ ID NO: 5893 - DNA, 23 bp, Artificial Sequence
  Synthetic oligonucleotide
  Mismatch hsa-miR-93-5p MIMAT0000093
ctacctgcacgattagcactttg

SEQ ID NO: 5894 - DNA, 21 bp, Artificial Sequence
  Synthetic oligonucleotide
  Mismatch hsa-miR-376c-5p MIMAT0022861
aacatagaagatatatccacc

SEQ ID NO: 5895 - DNA, 21 bp, Artificial Sequence
  Synthetic oligonucleotide
  Mismatch hsa-miR-6816-5p MIMAT0027532
gcagggacctatcccgcccca

SEQ ID NO: 5896 - DNA, 23 bp, Artificial Sequence
  Synthetic oligonucleotide
  Mismatch hsa-miR-4452 MIMAT0018974
atcacttaaggcttagaattcaa

SEQ ID NO: 5897 - DNA, 22 bp, Artificial Sequence
  Synthetic oligonucleotide
  Mismatch hsa-miR-548k MIMAT0005882
agcaaaatccgttagtactttt

SEQ ID NO: 5898 - DNA, 21 bp, Artificial Sequence
  Synthetic oligonucleotide
  Mismatch hsa-miR-6736-5p MIMAT0027373
accacagatgttctcacccag

SEQ ID NO: 5899 - DNA, 22 bp, Artificial Sequence
  Synthetic oligonucleotide
  Mismatch hsa-miR-1236-5p MIMAT0022945
tccccatttcctttgtcactca

SEQ ID NO: 5900 - DNA, 22 bp, Artificial Sequence
  Synthetic oligonucleotide
  Mismatch hsa-miR-764 MIMAT0010367
aggaggacaagcaagcacctgc

SEQ ID NO: 5901 - DNA, 22 bp, Artificial Sequence
  Synthetic oligonucleotide
  Mismatch hsa-miR-208b-5p MIMAT0026722
acataattcgaataaaaagctt

SEQ ID NO: 5902 - DNA, 22 bp, Artificial Sequence
  Synthetic oligonucleotide
  Mismatch hsa-miR-4482-5p MIMAT0019016
catttccatagttcactgggtt

SEQ ID NO: 5903 - DNA, 22 bp, Artificial Sequence
  Synthetic oligonucleotide
  Mismatch hsa-miR-6866-3p MIMAT0027633
ctagaggacagtcaaagggatc

SEQ ID NO: 5904 - DNA, 22 bp, Artificial Sequence
  Synthetic oligonucleotide
  Mismatch hsa-miR-518f-5p MIMAT0002841
gagaaagtgctctcctctagag

SEQ ID NO: 5905 - DNA, 19 bp, Artificial Sequence
  Synthetic oligonucleotide
  Mismatch hsa-miR-4330 MIMAT0016924
gcaaggcttcgatctgagg

SEQ ID NO: 5906 - DNA, 23 bp, Artificial Sequence
  Synthetic oligonucleotide
  Mismatch hsa-miR-6511b-3p MIMAT0025848
tgcaggcagaagaagtggtgagg

SEQ ID NO: 5907 - DNA, 24 bp, Artificial Sequence
  Synthetic oligonucleotide
  Mismatch hsa-miR-6750-5p MIMAT0027400
agcagctcacccaattgttccctg

SEQ ID NO: 5908 - DNA, 21 bp, Artificial Sequence
  Synthetic oligonucleotide
  Mismatch hsa-miR-4501 MIMAT0019037
tgattcatccatggtcacata

SEQ ID NO: 5909 - DNA, 22 bp, Artificial Sequence
  Synthetic oligonucleotide
  Mismatch hsa-miR-8067 MIMAT0030994
gactaagtttattgtttctagg

SEQ ID NO: 5910 - DNA, 21 bp, Artificial Sequence
  Synthetic oligonucleotide
  Mismatch hsa-miR-4803 MIMAT0019983
tcaatccacatcattatgtta

SEQ ID NO: 5911 - DNA, 21 bp, Artificial Sequence
  Synthetic oligonucleotide
  Mismatch hsa-miR-887-5p MIMAT0026720
gagtctaacaaagctcccaag

SEQ ID NO: 5912 - DNA, 22 bp, Artificial Sequence
  Synthetic oligonucleotide
  Mismatch hsa-miR-6509-3p MIMAT0025475
aaattaggtagcagcagtggaa

SEQ ID NO: 5913 - DNA, 22 bp, Artificial Sequence
  Synthetic oligonucleotide
  Mismatch hsa-miR-7107-5p MIMAT0028111
cccttcctcctttccaggccga

SEQ ID NO: 5914 - DNA, 22 bp, Artificial Sequence
  Synthetic oligonucleotide
  Mismatch hsa-miR-4772-3p MIMAT0019927
tctgatcaggcttagttgcagg

SEQ ID NO: 5915 - DNA, 23 bp, Artificial Sequence
  Synthetic oligonucleotide
  Mismatch hsa-miR-614 MIMAT0003282
ccacctggcaagttcaggcgttc

SEQ ID NO: 5916 - DNA, 22 bp, Artificial Sequence
  Synthetic oligonucleotide
  Mismatch hsa-miR-3193 MIMAT0015077
actcctcagattttacgcagga

SEQ ID NO: 5917 - DNA, 23 bp, Artificial Sequence
  Synthetic oligonucleotide
  Mismatch hsa-miR-4783-3p MIMAT0019947
gcagacgcgcccttacaccgggg

SEQ ID NO: 5918 - DNA, 19 bp, Artificial Sequence
  Synthetic oligonucleotide
  Mismatch hsa-miR-1250-3p MIMAT0026740
tgaatgggtcggaaaatgt

SEQ ID NO: 5919 - DNA, 22 bp, Artificial Sequence
  Synthetic oligonucleotide
  Mismatch hsa-miR-6761-3p MIMAT0027423
ggagtgagagaatagcgtagga

SEQ ID NO: 5920 - DNA, 23 bp, Artificial Sequence
  Synthetic oligonucleotide
  Mismatch hsa-miR-6734-3p MIMAT0027370
ctgagagaagagcaagggaaggg

SEQ ID NO: 5921 - DNA, 21 bp, Artificial Sequence
  Synthetic oligonucleotide
  Mismatch hsa-miR-892a MIMAT0004907
ctacgcagaatagacacagtg

SEQ ID NO: 5922 - DNA, 22 bp, Artificial Sequence
  Synthetic oligonucleotide
  Mismatch hsa-miR-379-3p MIMAT0004690
agttagtggactttgttacata

SEQ ID NO: 5923 - DNA, 22 bp, Artificial Sequence
  Synthetic oligonucleotide
  Mismatch hsa-miR-1304-3p MIMAT0022720
ggggttcgaggtcacagtgaga

SEQ ID NO: 5924 - DNA, 18 bp, Artificial Sequence
  Synthetic oligonucleotide
  Mismatch hsa-miR-4530 MIMAT0019069
cgctcccaccctgctggg

SEQ ID NO: 5925 - DNA, 23 bp, Artificial Sequence
  Synthetic oligonucleotide
  Mismatch hsa-miR-4707-5p MIMAT0019807
ccagaacccgcctacgccggggc

SEQ ID NO: 5926 - DNA, 21 bp, Artificial Sequence
  Synthetic oligonucleotide
  Mismatch hsa-miR-6068 MIMAT0023693
ccaccgccggtaactcgcagg

SEQ ID NO: 5927 - DNA, 22 bp, Artificial Sequence
  Synthetic oligonucleotide
  Mismatch hsa-miR-24-1-5p MIMAT0000079
actgatatcagtccagtaggca

SEQ ID NO: 5928 - DNA, 22 bp, Artificial Sequence
  Synthetic oligonucleotide
  Mismatch hsa-miR-3689e MIMAT0019009
tcccaggaacctcgatatcaca

SEQ ID NO: 5929 - DNA, 22 bp, Artificial Sequence
  Synthetic oligonucleotide
  Mismatch hsa-miR-5584-3p MIMAT0022284
aattgggcaaaaagaagaacta

SEQ ID NO: 5930 - DNA, 22 bp, Artificial Sequence
  Synthetic oligonucleotide
  Mismatch hsa-miR-5010-5p MIMAT0021043
aattttgctctatcatccccct

SEQ ID NO: 5931 - DNA, 20 bp, Artificial Sequence
  Synthetic oligonucleotide
  Mismatch hsa-miR-6125 MIMAT0024598
tccgccgctttgccttccgc

SEQ ID NO: 5932 - DNA, 23 bp, Artificial Sequence
  Synthetic oligonucleotide
  Mismatch hsa-miR-6835-3p MIMAT0027571
ctgggagacagattagtgctttt

SEQ ID NO: 5933 - DNA, 22 bp, Artificial Sequence
  Synthetic oligonucleotide
  Mismatch hsa-miR-4424 MIMAT0018939
tagtccattttatgttaactct

SEQ ID NO: 5934 - DNA, 23 bp, Artificial Sequence
  Synthetic oligonucleotide
  Mismatch hsa-miR-7703 MIMAT0030018
cctgggagaaggttagagtgcaa

SEQ ID NO: 5935 - DNA, 25 bp, Artificial Sequence
  Synthetic oligonucleotide
  Mismatch hsa-miR-652-5p MIMAT0022709
tgaatggcaccctcctctagggttg

SEQ ID NO: 5936 - DNA, 18 bp, Artificial Sequence
  Synthetic oligonucleotide
  Mismatch hsa-miR-4272 MIMAT0016902
acaatcatcagttgaatg

SEQ ID NO: 5937 - DNA, 22 bp, Artificial Sequence
  Synthetic oligonucleotide
  Mismatch hsa-miR-3691-3p MIMAT0019224
gagaggatgacatagacttggt

SEQ ID NO: 5938 - DNA, 22 bp, Artificial Sequence
  Synthetic oligonucleotide
  Mismatch hsa-miR-3183 MIMAT0015063
tccgagcgactttgagagaggc

SEQ ID NO: 5939 - DNA, 23 bp, Artificial Sequence
  Synthetic oligonucleotide
  Mismatch hsa-miR-6863 MIMAT0027627
cactcaatccttttccacgtcta

SEQ ID NO: 5940 - DNA, 21 bp, Artificial Sequence
  Synthetic oligonucleotide
  Mismatch hsa-miR-3942-3p MIMAT0019230
atgtaatactactatctgaaa

SEQ ID NO: 5941 - DNA, 26 bp, Artificial Sequence
  Synthetic oligonucleotide
  Mismatch hsa-miR-1244 MIMAT0005896
aaccatctcatacaattcaactactt

SEQ ID NO: 5942 - DNA, 25 bp, Artificial Sequence
  Synthetic oligonucleotide
  Mismatch hsa-miR-6812-5p MIMAT0027524
gctgctcctccccacttcaccccat

SEQ ID NO: 5943 - DNA, 22 bp, Artificial Sequence
  Synthetic oligonucleotide
  Mismatch hsa-miR-556-3p MIMAT0004793
aaagatgagcttttggtaatat

SEQ ID NO: 5944 - DNA, 22 bp, Artificial Sequence
  Synthetic oligonucleotide
  Mismatch hsa-miR-373-5p MIMAT0000725
ggaaagcgcccttattttgagt

SEQ ID NO: 5945 - DNA, 19 bp, Artificial Sequence
  Synthetic oligonucleotide
  Mismatch hsa-miR-564 MIMAT0003228
gcctgctgttaccgtgcct

SEQ ID NO: 5946 - DNA, 22 bp, Artificial Sequence
  Synthetic oligonucleotide
  Mismatch hsa-miR-548o-5p MIMAT0022738
ggcaaaaaccgttattactttt

SEQ ID NO: 5947 - DNA, 22 bp, Artificial Sequence
  Synthetic oligonucleotide
  Mismatch hsa-miR-367-3p MIMAT0000719
tcaccattgctttagtgcaatt

SEQ ID NO: 5948 - DNA, 22 bp, Artificial Sequence
  Synthetic oligonucleotide
  Mismatch hsa-miR-601 MIMAT0003269
ctcctccaacatccctagacca

SEQ ID NO: 5949 - DNA, 19 bp, Artificial Sequence
  Synthetic oligonucleotide
  Mismatch hsa-miR-4327 MIMAT0016889
ccagtcccttatgcaagcc

SEQ ID NO: 5950 - DNA, 26 bp, Artificial Sequence
  Synthetic oligonucleotide
  Mismatch hsa-miR-4665-3p MIMAT0019740
ggcgggggctacgcgttgcggccgag

SEQ ID NO: 5951 - DNA, 21 bp, Artificial Sequence
  Synthetic oligonucleotide
  Mismatch hsa-miR-4437 MIMAT0018953
aacctttgtattctgagccca

SEQ ID NO: 5952 - DNA, 22 bp, Artificial Sequence
  Synthetic oligonucleotide
  Mismatch hsa-miR-548aq-3p MIMAT0022264
gcaaaagtaatcacagtttttg

SEQ ID NO: 5953 - DNA, 22 bp, Artificial Sequence
  Synthetic oligonucleotide
  Mismatch hsa-miR-5191 MIMAT0021122
agcacttcatttctcctatcct

SEQ ID NO: 5954 - DNA, 22 bp, Artificial Sequence
  Synthetic oligonucleotide
  Mismatch hsa-miR-4738-3p MIMAT0019867
tcctccaggcgtcccagtttca

SEQ ID NO: 5955 - DNA, 22 bp, Artificial Sequence
  Synthetic oligonucleotide
  Mismatch hsa-miR-876-3p MIMAT0004925
tgaattactttacaaaccacca

SEQ ID NO: 5956 - DNA, 22 bp, Artificial Sequence
  Synthetic oligonucleotide
  Mismatch hsa-miR-6792-3p MIMAT0027485
atgagcaggggtcgtggaggag

SEQ ID NO: 5957 - DNA, 22 bp, Artificial Sequence
  Synthetic oligonucleotide
  Mismatch hsa-miR-3922-3p MIMAT0018197
aaagagtcaagctaaggccaga

SEQ ID NO: 5958 - DNA, 23 bp, Artificial Sequence
  Synthetic oligonucleotide
  Mismatch hsa-miR-423-5p MIMAT0004748
aaagtctcgctccttgcccctca

SEQ ID NO: 5959 - DNA, 26 bp, Artificial Sequence
  Synthetic oligonucleotide
  Mismatch hsa-miR-1272 MIMAT0005925
tttcagaatttgctgttatcatcatc

SEQ ID NO: 5960 - DNA, 18 bp, Artificial Sequence
  Synthetic oligonucleotide
  Mismatch hsa-miR-4434 MIMAT0018950
ttctactccacttctcct

SEQ ID NO: 5961 - DNA, 22 bp, Artificial Sequence
  Synthetic oligonucleotide
  Mismatch hsa-miR-200a-3p MIMAT0000682
acatcgttacctaacagtgtta

SEQ ID NO: 5962 - DNA, 19 bp, Artificial Sequence
  Synthetic oligonucleotide
  Mismatch hsa-miR-6870-5p MIMAT0027640
tcaacccctttctccccca

SEQ ID NO: 5963 - DNA, 21 bp, Artificial Sequence
  Synthetic oligonucleotide
  Mismatch hsa-miR-509-5p MIMAT0004779
tgattgccaccatctgcagta

SEQ ID NO: 5964 - DNA, 20 bp, Artificial Sequence
  Synthetic oligonucleotide
  Mismatch hsa-miR-4313 MIMAT0016865
gggtttgggatcagggggct

SEQ ID NO: 5965 - DNA, 22 bp, Artificial Sequence
  Synthetic oligonucleotide
  Mismatch hsa-miR-944 MIMAT0004987
ctcatccgatgctcaataattt

SEQ ID NO: 5966 - DNA, 23 bp, Artificial Sequence
  Synthetic oligonucleotide
  Mismatch hsa-miR-3184-3p MIMAT0022731
tgaggggcagagtacgagacttt

SEQ ID NO: 5967 - DNA, 22 bp, Artificial Sequence
  Synthetic oligonucleotide
  Mismatch hsa-miR-548e-3p MIMAT0005874
tgcaaaagtagcttcagttttt

SEQ ID NO: 5968 - DNA, 24 bp, Artificial Sequence
  Synthetic oligonucleotide
  Mismatch hsa-miR-29b-1-5p MIMAT0004514
tctaaaccaccattcgaaaccagc

SEQ ID NO: 5969 - DNA, 22 bp, Artificial Sequence
  Synthetic oligonucleotide
  Mismatch hsa-miR-1265 MIMAT0005918
aacaacacttgttcacatcctg

SEQ ID NO: 5970 - DNA, 22 bp, Artificial Sequence
  Synthetic oligonucleotide
  Mismatch hsa-miR-548ac MIMAT0018938
caaaagtaattatcggtttttg

SEQ ID NO: 5971 - DNA, 22 bp, Artificial Sequence
  Synthetic oligonucleotide
  Mismatch hsa-miR-1343-3p MIMAT0019776
gcgagagtgcgaaccccaggag

SEQ ID NO: 5972 - DNA, 22 bp, Artificial Sequence
  Synthetic oligonucleotide
  Mismatch hsa-miR-515-3p MIMAT0002827
aacgctccaaataaaggcactc

SEQ ID NO: 5973 - DNA, 21 bp, Artificial Sequence
  Synthetic oligonucleotide
  Mismatch hsa-miR-5694 MIMAT0022487
ctgagacagtttcatgatctg

SEQ ID NO: 5974 - DNA, 23 bp, Artificial Sequence
  Synthetic oligonucleotide
  Mismatch hsa-miR-3166 MIMAT0015040
taggccagtaggttttgtctgcg

SEQ ID NO: 5975 - DNA, 22 bp, Artificial Sequence
  Synthetic oligonucleotide
  Mismatch hsa-miR-203b-5p MIMAT0019813
tgtgaaatgttctggaccacta

SEQ ID NO: 5976 - DNA, 21 bp, Artificial Sequence
  Synthetic oligonucleotide
  Mismatch hsa-miR-410-3p MIMAT0002171
acaggccatccatgttatatt

SEQ ID NO: 5977 - DNA, 17 bp, Artificial Sequence
  Synthetic oligonucleotide
  Mismatch hsa-miR-4317 MIMAT0016872
aaactctttggcaatgt

SEQ ID NO: 5978 - DNA, 22 bp, Artificial Sequence
  Synthetic oligonucleotide
  Mismatch hsa-miR-3164 MIMAT0015038
cgccatttcccccaaagtcaca

SEQ ID NO: 5979 - DNA, 22 bp, Artificial Sequence
  Synthetic oligonucleotide
  Mismatch hsa-miR-365b-3p MIMAT0022834
ataaggattttctggggcatta

SEQ ID NO: 5980 - DNA, 22 bp, Artificial Sequence
  Synthetic oligonucleotide
  Mismatch hsa-miR-216a-5p MIMAT0000273
tcacagttgcctactgagatta

SEQ ID NO: 5981 - DNA, 23 bp, Artificial Sequence
  Synthetic oligonucleotide
  Mismatch hsa-miR-514a-5p MIMAT0022702
catgattgtcaccttccagagta

SEQ ID NO: 5982 - DNA, 20 bp, Artificial Sequence
  Synthetic oligonucleotide
  Mismatch hsa-miR-3190-5p MIMAT0015073
tggggacgttactggccaga

SEQ ID NO: 5983 - DNA, 24 bp, Artificial Sequence
  Synthetic oligonucleotide
  Mismatch hsa-miR-6795-5p MIMAT0027490
acagcctctcatctcgtcccccca

SEQ ID NO: 5984 - DNA, 22 bp, Artificial Sequence
  Synthetic oligonucleotide
  Mismatch hsa-miR-4467 MIMAT0018994
aagcccataacctccgccgcca

SEQ ID NO: 5985 - DNA, 23 bp, Artificial Sequence
  Synthetic oligonucleotide
  Mismatch hsa-miR-6734-5p MIMAT0027369
tctccacctcatcttcccctcaa

SEQ ID NO: 5986 - DNA, 23 bp, Artificial Sequence
  Synthetic oligonucleotide
  Mismatch hsa-miR-155-5p MIMAT0000646
acccctatcacgtctagcattaa

SEQ ID NO: 5987 - DNA, 27 bp, Artificial Sequence
  Synthetic oligonucleotide
  Mismatch hsa-miR-1183 MIMAT0005828
tgcccactctcaccatttcctacagtg

SEQ ID NO: 5988 - DNA, 20 bp, Artificial Sequence
  Synthetic oligonucleotide
  Mismatch hsa-miR-548x-3p MIMAT0015081
gaaagtaatcacagttttta

SEQ ID NO: 5989 - DNA, 21 bp, Artificial Sequence
  Synthetic oligonucleotide
  Mismatch hsa-miR-4694-3p MIMAT0019787
aggtgttatctcgtccatttg

SEQ ID NO: 5990 - DNA, 22 bp, Artificial Sequence
  Synthetic oligonucleotide
  Mismatch hsa-miR-3144-5p MIMAT0015014
ctatatatctccctggtcccct

SEQ ID NO: 5991 - DNA, 22 bp, Artificial Sequence
  Synthetic oligonucleotide
  Mismatch hsa-let-7d-3p MIMAT0004484
agaaaggcagctagtcgtatag

SEQ ID NO: 5992 - DNA, 23 bp, Artificial Sequence
  Synthetic oligonucleotide
  Mismatch hsa-miR-520g-5p MIMAT0026611
aaacagaaagtgtctcctctaga

SEQ ID NO: 5993 - DNA, 21 bp, Artificial Sequence
  Synthetic oligonucleotide
  Mismatch hsa-miR-7854-3p MIMAT0030429
ttcccatctgtagtcacctca

SEQ ID NO: 5994 - DNA, 18 bp, Artificial Sequence
  Synthetic oligonucleotide
  Mismatch hsa-miR-3652 MIMAT0018072
tcctcacttctccagccg

SEQ ID NO: 5995 - DNA, 17 bp, Artificial Sequence
  Synthetic oligonucleotide
  Mismatch hsa-miR-1275 MIMAT0005929
gacagctcctcccccac

SEQ ID NO: 5996 - DNA, 22 bp, Artificial Sequence
  Synthetic oligonucleotide
  Mismatch hsa-miR-500a-3p MIMAT0002871
cagaatccttgttcaggtgcat

SEQ ID NO: 5997 - DNA, 21 bp, Artificial Sequence
  Synthetic oligonucleotide
  Mismatch hsa-miR-552-3p MIMAT0003215
ttgtctaacctatcacctgtt

SEQ ID NO: 5998 - DNA, 22 bp, Artificial Sequence
  Synthetic oligonucleotide
  Mismatch hsa-miR-22-3p MIMAT0000077
acagttcttcatttggcagctt

SEQ ID NO: 5999 - DNA, 22 bp, Artificial Sequence
  Synthetic oligonucleotide
  Mismatch hsa-miR-219a-2-3p MIMAT0004675
acagatgtccaatcacaattct

SEQ ID NO: 6000 - DNA, 22 bp, Artificial Sequence
  Synthetic oligonucleotide
  Mismatch hsa-miR-570-5p MIMAT0022707
gggaaaaactgttattaccttt

SEQ ID NO: 6001 - DNA, 21 bp, Artificial Sequence
  Synthetic oligonucleotide
  Mismatch hsa-miR-411-5p MIMAT0003329
cgtacgctatttggtctacta

SEQ ID NO: 6002 - DNA, 23 bp, Artificial Sequence
  Synthetic oligonucleotide
  Mismatch hsa-miR-1288-5p MIMAT0026743
ggtgagttacagctctgatctgc

SEQ ID NO: 6003 - DNA, 23 bp, Artificial Sequence
  Synthetic oligonucleotide
  Mismatch hsa-miR-6884-3p MIMAT0027669
aggggagacggattggtgatggg

SEQ ID NO: 6004 - DNA, 22 bp, Artificial Sequence
  Synthetic oligonucleotide
  Mismatch hsa-miR-891b MIMAT0004913
tcaatgactcaaataagttgca

SEQ ID NO: 6005 - DNA, 21 bp, Artificial Sequence
  Synthetic oligonucleotide
  Mismatch hsa-miR-3606-5p MIMAT0017983
aattaaaataatcttcactaa

SEQ ID NO: 6006 - DNA, 24 bp, Artificial Sequence
  Synthetic oligonucleotide
  Mismatch hsa-miR-3147 MIMAT0015019
tcacaccctcctctttgcccaacc

SEQ ID NO: 6007 - DNA, 24 bp, Artificial Sequence
  Synthetic oligonucleotide
  Mismatch hsa-miR-1247-3p MIMAT0022721
gctccagtctcgatattcccgggg

SEQ ID NO: 6008 - DNA, 22 bp, Artificial Sequence
  Synthetic oligonucleotide
  Mismatch hsa-miR-5700 MIMAT0022493
ccttcaataatccaatgcatta

SEQ ID NO: 6009 - DNA, 23 bp, Artificial Sequence
  Synthetic oligonucleotide
  Mismatch hsa-miR-4653-3p MIMAT0019719
tctccaagcaacttttaactcca

SEQ ID NO: 6010 - DNA, 22 bp, Artificial Sequence
  Synthetic oligonucleotide
  Mismatch hsa-miR-1252-3p MIMAT0026744
aaaaggaaattttgctcatttg

SEQ ID NO: 6011 - DNA, 23 bp, Artificial Sequence
  Synthetic oligonucleotide
  Mismatch hsa-miR-5090 MIMAT0021082
caccctacaccatcctgccccgg

SEQ ID NO: 6012 - DNA, 22 bp, Artificial Sequence
  Synthetic oligonucleotide
  Mismatch hsa-miR-365a-3p MIMAT0000710
ataaggattttctggggcatta

SEQ ID NO: 6013 - DNA, 20 bp, Artificial Sequence
  Synthetic oligonucleotide
  Mismatch hsa-miR-7154-3p MIMAT0028219
atcccacaatctgtcctcct

SEQ ID NO: 6014 - DNA, 22 bp, Artificial Sequence
  Synthetic oligonucleotide
  Mismatch hsa-miR-3179 MIMAT0015056
acgtttaaattctaccccttct

SEQ ID NO: 6015 - DNA, 21 bp, Artificial Sequence
  Synthetic oligonucleotide
  Mismatch hsa-miR-6792-5p MIMAT0027484
tcacccagagttcctgcttac

SEQ ID NO: 6016 - DNA, 22 bp, Artificial Sequence
  Synthetic oligonucleotide
  Mismatch hsa-miR-3152-5p MIMAT0019207
cttgtgttagattagaggcaat

SEQ ID NO: 6017 - DNA, 22 bp, Artificial Sequence
  Synthetic oligonucleotide
  Mismatch hsa-miR-744-3p MIMAT0004946
aggttgaggtttatggcaacag

SEQ ID NO: 6018 - DNA, 22 bp, Artificial Sequence
  Synthetic oligonucleotide
  Mismatch hsa-miR-138-2-3p MIMAT0004596
aaccctggtgttatgaaatagc

SEQ ID NO: 6019 - DNA, 23 bp, Artificial Sequence
  Synthetic oligonucleotide
  Mismatch hsa-miR-8084 MIMAT0031011
tactgattttttttttagtattc

SEQ ID NO: 6020 - DNA, 22 bp, Artificial Sequence
  Synthetic oligonucleotide
  Mismatch hsa-miR-5707 MIMAT0022501
gccttgtacagttttcaaacgt

SEQ ID NO: 6021 - DNA, 23 bp, Artificial Sequence
  Synthetic oligonucleotide
  Mismatch hsa-miR-8081 MIMAT0031008
cattcagaaaggttcgactcaag

SEQ ID NO: 6022 - DNA, 22 bp, Artificial Sequence
  Synthetic oligonucleotide
  Mismatch hsa-miR-502-3p MIMAT0004775
tgaatccttgcttaggtgcatt

SEQ ID NO: 6023 - DNA, 23 bp, Artificial Sequence
  Synthetic oligonucleotide
  Mismatch hsa-miR-3937 MIMAT0018352
cccccattgctattgccgcctgt

SEQ ID NO: 6024 - DNA, 21 bp, Artificial Sequence
  Synthetic oligonucleotide
  Mismatch hsa-miR-3064-5p MIMAT0019864
ttgcacaccattacagccaga

SEQ ID NO: 6025 - DNA, 22 bp, Artificial Sequence
  Synthetic oligonucleotide
  Mismatch hsa-miR-509-3-5p MIMAT0004975
catgattgccatatctgcagta

SEQ ID NO: 6026 - DNA, 22 bp, Artificial Sequence
  Synthetic oligonucleotide
  Mismatch hsa-miR-889-5p MIMAT0026719
gaccatactacaaacagccatt

SEQ ID NO: 6027 - DNA, 21 bp, Artificial Sequence
  Synthetic oligonucleotide
  Mismatch hsa-miR-6745 MIMAT0027391
aaccagacctctttccaccca

SEQ ID NO: 6028 - DNA, 21 bp, Artificial Sequence
  Synthetic oligonucleotide
  Mismatch hsa-miR-3918 MIMAT0018192
agtctccatccacggccctgt

SEQ ID NO: 6029 - DNA, 22 bp, Artificial Sequence
  Synthetic oligonucleotide
  Mismatch hsa-miR-4755-5p MIMAT0019895
aaagccaggcttcgaagggaaa

SEQ ID NO: 6030 - DNA, 22 bp, Artificial Sequence
  Synthetic oligonucleotide
  Mismatch hsa-miR-3619-3p MIMAT0019219
ccacagcaggctagatggtccc

SEQ ID NO: 6031 - DNA, 18 bp, Artificial Sequence
  Synthetic oligonucleotide
  Mismatch hsa-miR-500b-5p MIMAT0016925
acccaggctgcaaggatt

SEQ ID NO: 6032 - DNA, 22 bp, Artificial Sequence
  Synthetic oligonucleotide
  Mismatch hsa-miR-192-3p MIMAT0004543
ctgtgacctataaaattggcag

SEQ ID NO: 6033 - DNA, 17 bp, Artificial Sequence
  Synthetic oligonucleotide
  Mismatch hsa-miR-4296 MIMAT0016845
tgagcccaagcccacat

SEQ ID NO: 6034 - DNA, 22 bp, Artificial Sequence
  Synthetic oligonucleotide
  Mismatch hsa-miR-517a-3p MIMAT0002852
acactctaaagaaatgcacgat

SEQ ID NO: 6035 - DNA, 21 bp, Artificial Sequence
  Synthetic oligonucleotide
  Mismatch hsa-miR-873-5p MIMAT0004953
aggagactcattagttcctgc

SEQ ID NO: 6036 - DNA, 22 bp, Artificial Sequence
  Synthetic oligonucleotide
  Mismatch hsa-miR-1233-5p MIMAT0022943
tgccgtgccctaacctcccact

SEQ ID NO: 6037 - DNA, 22 bp, Artificial Sequence
  Synthetic oligonucleotide
  Mismatch hsa-miR-1266-3p MIMAT0026742
tccctcagggctcagaacaggg

SEQ ID NO: 6038 - DNA, 22 bp, Artificial Sequence
  Synthetic oligonucleotide
  Mismatch hsa-miR-2114-5p MIMAT0011156
gaccgcttcaaaaaagggacta

SEQ ID NO: 6039 - DNA, 22 bp, Artificial Sequence
  Synthetic oligonucleotide
  Mismatch hsa-miR-222-5p MIMAT0004569
aggatctacaccagctactgag

SEQ ID NO: 6040 - DNA, 22 bp, Artificial Sequence
  Synthetic oligonucleotide
  Mismatch hsa-miR-542-3p MIMAT0003389
tttcagttatctttctgtcaca

SEQ ID NO: 6041 - DNA, 22 bp, Artificial Sequence
  Synthetic oligonucleotide
  Mismatch hsa-miR-4768-5p MIMAT0019920
atccatgggatttagagagaat

SEQ ID NO: 6042 - DNA, 22 bp, Artificial Sequence
  Synthetic oligonucleotide
  Mismatch hsa-miR-589-5p MIMAT0004799
ctcagagcagatatggttctca

SEQ ID NO: 6043 - DNA, 22 bp, Artificial Sequence
  Synthetic oligonucleotide
  Mismatch hsa-miR-16-1-3p MIMAT0004489
tcagcagcacaactaatactgg

SEQ ID NO: 6044 - DNA, 22 bp, Artificial Sequence
  Synthetic oligonucleotide
  Mismatch hsa-miR-181c-3p MIMAT0004559
gtccactcaacaatcgatggtt

SEQ ID NO: 6045 - DNA, 22 bp, Artificial Sequence
  Synthetic oligonucleotide
  Mismatch hsa-miR-517b-3p MIMAT0002857
acactctaaagaaatgcacgat

SEQ ID NO: 6046 - DNA, 22 bp, Artificial Sequence
  Synthetic oligonucleotide
  Mismatch hsa-miR-548o-3p MIMAT0005919
gcaaaagtaaccacagttttgg

SEQ ID NO: 6047 - DNA, 21 bp, Artificial Sequence
  Synthetic oligonucleotide
  Mismatch hsa-miR-624-3p MIMAT0004807
aggtaatacctttaccttgtg

SEQ ID NO: 6048 - DNA, 24 bp, Artificial Sequence
  Synthetic oligonucleotide
  Mismatch hsa-miR-6766-5p MIMAT0027432
ctcaataagatctattcccacccg

SEQ ID NO: 6049 - DNA, 22 bp, Artificial Sequence
  Synthetic oligonucleotide
  Mismatch hsa-miR-4777-3p MIMAT0019935
tacagcattcttaatgaggtat

SEQ ID NO: 6050 - DNA, 22 bp, Artificial Sequence
  Synthetic oligonucleotide
  Mismatch hsa-miR-181a-2-3p MIMAT0004558
ggtacagtcaatagtcagtggt

SEQ ID NO: 6051 - DNA, 22 bp, Artificial Sequence
  Synthetic oligonucleotide
  Mismatch hsa-miR-6814-5p MIMAT0027528
tggcagcatctttcccttggga

SEQ ID NO: 6052 - DNA, 21 bp, Artificial Sequence
  Synthetic oligonucleotide
  Mismatch hsa-miR-4732-3p MIMAT0019856
cagaacaggattggtcagggc

SEQ ID NO: 6053 - DNA, 22 bp, Artificial Sequence
  Synthetic oligonucleotide
  Mismatch hsa-miR-335-3p MIMAT0004703
ggtcaggagcatcaatgaaaaa

SEQ ID NO: 6054 - DNA, 22 bp, Artificial Sequence
  Synthetic oligonucleotide
  Mismatch hsa-miR-5581-5p MIMAT0022275
tctccatttcttttggaaggct

SEQ ID NO: 6055 - DNA, 22 bp, Artificial Sequence
  Synthetic oligonucleotide
  Mismatch hsa-miR-27a-5p MIMAT0004501
tgctcacaagctactaagccct

SEQ ID NO: 6056 - DNA, 22 bp, Artificial Sequence
  Synthetic oligonucleotide
  Mismatch hsa-miR-875-5p MIMAT0004922
cacctgataaatttgaggtata

SEQ ID NO: 6057 - DNA, 22 bp, Artificial Sequence
  Synthetic oligonucleotide
  Mismatch hsa-miR-942-3p MIMAT0026734
acttctctgttctggccatgtg

SEQ ID NO: 6058 - DNA, 21 bp, Artificial Sequence
  Synthetic oligonucleotide
  Mismatch hsa-miR-4269 MIMAT0016897
gccagggctgcttgtgcctgc

SEQ ID NO: 6059 - DNA, 21 bp, Artificial Sequence
  Synthetic oligonucleotide
  Mismatch hsa-miR-376a-2-5p MIMAT0022928
accatagaagataaatctacc

SEQ ID NO: 6060 - DNA, 21 bp, Artificial Sequence
  Synthetic oligonucleotide
  Mismatch hsa-miR-650 MIMAT0003320
gtcctgagagtactgcctcct

SEQ ID NO: 6061 - DNA, 21 bp, Artificial Sequence
  Synthetic oligonucleotide
  Mismatch hsa-miR-1245a MIMAT0005897
atgtaggcctccagatcactt

SEQ ID NO: 6062 - DNA, 22 bp, Artificial Sequence
  Synthetic oligonucleotide
  Mismatch hsa-miR-6884-5p MIMAT0027668
caacatcacctcttcagcctct

SEQ ID NO: 6063 - DNA, 23 bp, Artificial Sequence
  Synthetic oligonucleotide
  Mismatch hsa-miR-1184 MIMAT0005829
ggaagccatcaaaccgctgcagg

SEQ ID NO: 6064 - DNA, 18 bp, Artificial Sequence
  Synthetic oligonucleotide
  Mismatch hsa-miR-4256 MIMAT0016877
accttcactaggtcagat

SEQ ID NO: 6065 - DNA, 22 bp, Artificial Sequence
  Synthetic oligonucleotide
  Mismatch hsa-miR-517-5p MIMAT0002851
agacagtgcttttatctagagg

SEQ ID NO: 6066 - DNA, 21 bp, Artificial Sequence
  Synthetic oligonucleotide
  Mismatch hsa-miR-4480 MIMAT0019014
taaagtaactctcacttggct

SEQ ID NO: 6067 - DNA, 21 bp, Artificial Sequence
  Synthetic oligonucleotide
  Mismatch hsa-miR-4635 MIMAT0019692
ttgcgggttccaacttcaaga

SEQ ID NO: 6068 - DNA, 17 bp, Artificial Sequence
  Synthetic oligonucleotide
  Mismatch hsa-miR-4531 MIMAT0019070
tcagaaatcttctccat

SEQ ID NO: 6069 - DNA, 21 bp, Artificial Sequence
  Synthetic oligonucleotide
  Mismatch hsa-miR-6892-3p MIMAT0027685
ctgcaaggggcaggagaggga

SEQ ID NO: 6070 - DNA, 21 bp, Artificial Sequence
  Synthetic oligonucleotide
  Mismatch hsa-miR-4797-5p MIMAT0019972
ttcagtaagtaacactctgtc

SEQ ID NO: 6071 - DNA, 23 bp, Artificial Sequence
  Synthetic oligonucleotide
  Mismatch hsa-miR-18b-5p MIMAT0001412
ctaactgcactaattgcacctta

SEQ ID NO: 6072 - DNA, 23 bp, Artificial Sequence
  Synthetic oligonucleotide
  Mismatch hsa-miR-18a-5p MIMAT0000072
ctatctgcactaattgcacctta

SEQ ID NO: 6073 - DNA, 22 bp, Artificial Sequence
  Synthetic oligonucleotide
  Mismatch hsa-miR-4778-5p MIMAT0019936
cctcttcttcccctacagaatt

SEQ ID NO: 6074 - DNA, 23 bp, Artificial Sequence
  Synthetic oligonucleotide
  Mismatch hsa-miR-3943 MIMAT0018359
cgccaagtgaagtttgggggcta

SEQ ID NO: 6075 - DNA, 22 bp, Artificial Sequence
  Synthetic oligonucleotide
  Mismatch hsa-miR-6773-3p MIMAT0027447
ctatgggcagaatagtgacagt

SEQ ID NO: 6076 - DNA, 22 bp, Artificial Sequence
  Synthetic oligonucleotide
  Mismatch hsa-miR-6507-3p MIMAT0025471
gggaaaaatagataggactttg

SEQ ID NO: 6077 - DNA, 22 bp, Artificial Sequence
  Synthetic oligonucleotide
  Mismatch hsa-miR-7-1-3p MIMAT0004553
tatggcagactacgatttgttg

SEQ ID NO: 6078 - DNA, 19 bp, Artificial Sequence
  Synthetic oligonucleotide
  Mismatch hsa-miR-378j MIMAT0024612
ttctggctttaaatccagt

SEQ ID NO: 6079 - DNA, 22 bp, Artificial Sequence
  Synthetic oligonucleotide
  Mismatch hsa-miR-6839-5p MIMAT0027580
tgggtcgtctccccaatccaga

SEQ ID NO: 6080 - DNA, 22 bp, Artificial Sequence
  Synthetic oligonucleotide
  Mismatch hsa-miR-6788-3p MIMAT0027477
ctgcagggaggatagtggcgaa

SEQ ID NO: 6081 - DNA, 21 bp, Artificial Sequence
  Synthetic oligonucleotide
  Mismatch hsa-miR-337-5p MIMAT0004695
aactcctgtacaaagccgttc

SEQ ID NO: 6082 - DNA, 19 bp, Artificial Sequence
  Synthetic oligonucleotide
  Mismatch hsa-miR-4800-3p MIMAT0019979
gtggacagttggacggatg

SEQ ID NO: 6083 - DNA, 22 bp, Artificial Sequence
  Synthetic oligonucleotide
  Mismatch hsa-miR-374a-5p MIMAT0000727
cacttatcaggccgtattataa

SEQ ID NO: 6084 - DNA, 21 bp, Artificial Sequence
  Synthetic oligonucleotide
  Mismatch hsa-miR-6513-3p MIMAT0025483
ctagggacagtcgacacttga

SEQ ID NO: 6085 - DNA, 22 bp, Artificial Sequence
  Synthetic oligonucleotide
  Mismatch hsa-miR-4524a-5p MIMAT0019062
tgagacaggtttttgctgctat

SEQ ID NO: 6086 - DNA, 22 bp, Artificial Sequence
  Synthetic oligonucleotide
  Mismatch hsa-miR-28-3p MIMAT0004502
tccaggagctcttaatctagtg

SEQ ID NO: 6087 - DNA, 23 bp, Artificial Sequence
  Synthetic oligonucleotide
  Mismatch hsa-miR-4640-5p MIMAT0019699
cccaccagctgcctcctggccca

SEQ ID NO: 6088 - DNA, 21 bp, Artificial Sequence
  Synthetic oligonucleotide
  Mismatch hsa-miR-3611 MIMAT0017988
taagaatttccctcttcacaa

SEQ ID NO: 6089 - DNA, 22 bp, Artificial Sequence
  Synthetic oligonucleotide
  Mismatch hsa-miR-8070 MIMAT0030997
tggagtcagccaccaatcacat

SEQ ID NO: 6090 - DNA, 23 bp, Artificial Sequence
  Synthetic oligonucleotide
  Mismatch hsa-miR-10a-5p MIMAT0000253
cacaaattcggacttacagggta

SEQ ID NO: 6091 - DNA, 22 bp, Artificial Sequence
  Synthetic oligonucleotide
  Mismatch hsa-miR-29b-2-5p MIMAT0004515
ctaagccaccacatgaaaccag

SEQ ID NO: 6092 - DNA, 22 bp, Artificial Sequence
  Synthetic oligonucleotide
  Mismatch hsa-miR-4727-3p MIMAT0019848
gaatctgccagtctcccactat

SEQ ID NO: 6093 - DNA, 22 bp, Artificial Sequence
  Synthetic oligonucleotide
  Mismatch hsa-miR-561-3p MIMAT0003225
acttcaaggattctaaactttg

SEQ ID NO: 6094 - DNA, 22 bp, Artificial Sequence
  Synthetic oligonucleotide
  Mismatch hsa-miR-514b-5p MIMAT0015087
atgattgcctctttcttgagaa

SEQ ID NO: 6095 - DNA, 25 bp, Artificial Sequence
  Synthetic oligonucleotide
  Mismatch hsa-miR-638 MIMAT0003308
aggccgccacccgcttgcgatccct

SEQ ID NO: 6096 - DNA, 22 bp, Artificial Sequence
  Synthetic oligonucleotide
  Mismatch hsa-miR-6516-5p MIMAT0030417
tgctcacacctactactgcaaa

SEQ ID NO: 6097 - DNA, 20 bp, Artificial Sequence
  Synthetic oligonucleotide
  Mismatch hsa-miR-3607-3p MIMAT0017985
catcagaaaatgtttacagt

SEQ ID NO: 6098 - DNA, 22 bp, Artificial Sequence
  Synthetic oligonucleotide
  Mismatch hsa-miR-3146 MIMAT0015018
ccattctttcttccctagcatg

SEQ ID NO: 6099 - DNA, 22 bp, Artificial Sequence
  Synthetic oligonucleotide
  Mismatch hsa-miR-4707-3p MIMAT0019808
agaacctcggccagggcgggct

SEQ ID NO: 6100 - DNA, 22 bp, Artificial Sequence
  Synthetic oligonucleotide
  Mismatch hsa-miR-6860 MIMAT0027622
actcaccacagttctgcccagt

SEQ ID NO: 6101 - DNA, 16 bp, Artificial Sequence
  Synthetic oligonucleotide
  Mismatch hsa-miR-4267 MIMAT0016893
gtgccttcgagctgga

SEQ ID NO: 6102 - DNA, 18 bp, Artificial Sequence
  Synthetic oligonucleotide
  Mismatch hsa-miR-4325 MIMAT0016887
tcactgaatcaagtgcaa

SEQ ID NO: 6103 - DNA, 22 bp, Artificial Sequence
  Synthetic oligonucleotide
  Mismatch hsa-miR-510-5p MIMAT0002882
gtgattgccaccttcctgagta

SEQ ID NO: 6104 - DNA, 21 bp, Artificial Sequence
  Synthetic oligonucleotide
  Mismatch hsa-miR-5587-3p MIMAT0022290
gatgatcacatcgcccggggc

SEQ ID NO: 6105 - DNA, 23 bp, Artificial Sequence
  Synthetic oligonucleotide
  Mismatch hsa-miR-4726-5p MIMAT0019845
ccactccaggcttttctggccct

SEQ ID NO: 6106 - DNA, 22 bp, Artificial Sequence
  Synthetic oligonucleotide
  Mismatch hsa-miR-490-3p MIMAT0002806
cagcatggagttttccaggttg

SEQ ID NO: 6107 - DNA, 21 bp, Artificial Sequence
  Synthetic oligonucleotide
  Mismatch hsa-miR-647 MIMAT0003317
gaaggaagtgtatgcagccac

SEQ ID NO: 6108 - DNA, 22 bp, Artificial Sequence
  Synthetic oligonucleotide
  Mismatch hsa-miR-4726-3p MIMAT0019846
tgcggccagagaaaacctgggt

SEQ ID NO: 6109 - DNA, 21 bp, Artificial Sequence
  Synthetic oligonucleotide
  Mismatch hsa-miR-559 MIMAT0003223
ttttggtgcacttttacttta

SEQ ID NO: 6110 - DNA, 21 bp, Artificial Sequence
  Synthetic oligonucleotide
  Mismatch hsa-miR-101-3p MIMAT0000099
ttcagttatcttagtactgta

SEQ ID NO: 6111 - DNA, 23 bp, Artificial Sequence
  Synthetic oligonucleotide
  Mismatch hsa-miR-4644 MIMAT0019704
cttctgtctcttccctctctcca

SEQ ID NO: 6112 - DNA, 20 bp, Artificial Sequence
  Synthetic oligonucleotide
  Mismatch hsa-miR-6716-5p MIMAT0025844
ggcccttacttccattccca

SEQ ID NO: 6113 - DNA, 22 bp, Artificial Sequence
  Synthetic oligonucleotide
  Mismatch hsa-miR-301b-5p MIMAT0032026
agtagtgcaactccgtcagagc

SEQ ID NO: 6114 - DNA, 23 bp, Artificial Sequence
  Synthetic oligonucleotide
  Mismatch hsa-miR-3134 MIMAT0015000
aatatgtagtctcctatccatca

SEQ ID NO: 6115 - DNA, 22 bp, Artificial Sequence
  Synthetic oligonucleotide
  Mismatch hsa-miR-127-5p MIMAT0004604
atcagagcccttcgagcttcag

SEQ ID NO: 6116 - DNA, 24 bp, Artificial Sequence
  Synthetic oligonucleotide
  Mismatch hsa-miR-4663 MIMAT0019735
actgcacgtccataaagctcagct

SEQ ID NO: 6117 - DNA, 22 bp, Artificial Sequence
  Synthetic oligonucleotide
  Mismatch hsa-miR-193b-3p MIMAT0002819
agcgggactttatgggccagtt

SEQ ID NO: 6118 - DNA, 24 bp, Artificial Sequence
  Synthetic oligonucleotide
  Mismatch hsa-miR-589-3p MIMAT0003256
tctgggaaccggctcttgttctga

SEQ ID NO: 6119 - DNA, 18 bp, Artificial Sequence
  Synthetic oligonucleotide
  Mismatch hsa-miR-6861-3p MIMAT0027624
ctggggaaaagaggtcca

SEQ ID NO: 6120 - DNA, 17 bp, Artificial Sequence
  Synthetic oligonucleotide
  Mismatch hsa-miR-4419a MIMAT0018931
tgcagttccctccctca

SEQ ID NO: 6121 - DNA, 20 bp, Artificial Sequence
  Synthetic oligonucleotide
  Mismatch hsa-miR-6722-5p MIMAT0025853
gcatgtggttaggtgcgcct

SEQ ID NO: 6122 - DNA, 21 bp, Artificial Sequence
  Synthetic oligonucleotide
  Mismatch hsa-miR-7853-5p MIMAT0030428
gaagtcaggacttgcatttga

SEQ ID NO: 6123 - DNA, 22 bp, Artificial Sequence
  Synthetic oligonucleotide
  Mismatch hsa-miR-5194 MIMAT0021125
ccatcccattcttaacccctca

SEQ ID NO: 6124 - DNA, 22 bp, Artificial Sequence
  Synthetic oligonucleotide
  Mismatch hsa-miR-520a-3p MIMAT0002834
acagtccaaagaaaagcacttt

SEQ ID NO: 6125 - DNA, 23 bp, Artificial Sequence
  Synthetic oligonucleotide
  Mismatch hsa-miR-3192-5p MIMAT0015076
ttccactgctacttcctcccaga

SEQ ID NO: 6126 - DNA, 21 bp, Artificial Sequence
  Synthetic oligonucleotide
  Mismatch hsa-miR-6836-3p MIMAT0027575
ctgcggggccaagggaggcat

SEQ ID NO: 6127 - DNA, 23 bp, Artificial Sequence
  Synthetic oligonucleotide
  Mismatch hsa-miR-597-3p MIMAT0026619
acgcttgagccattagagaacca

SEQ ID NO: 6128 - DNA, 23 bp, Artificial Sequence
  Synthetic oligonucleotide
  Mismatch hsa-miR-548x-5p MIMAT0022733
caaaaactgcaaccacttttgca

SEQ ID NO: 6129 - DNA, 21 bp, Artificial Sequence
  Synthetic oligonucleotide
  Mismatch hsa-miR-6888-3p MIMAT0027677
ctggaaacaactgagacagat

SEQ ID NO: 6130 - DNA, 22 bp, Artificial Sequence
  Synthetic oligonucleotide
  Mismatch hsa-miR-6793-5p MIMAT0027486
tcaccccaaccttgaacccaca

SEQ ID NO: 6131 - DNA, 24 bp, Artificial Sequence
  Synthetic oligonucleotide
  Mismatch hsa-miR-8075 MIMAT0031002
cagacccgacatccaccatcagca

SEQ ID NO: 6132 - DNA, 22 bp, Artificial Sequence
  Synthetic oligonucleotide
  Mismatch hsa-miR-1471 MIMAT0007349
acacctggctcttcacgcgggc

SEQ ID NO: 6133 - DNA, 21 bp, Artificial Sequence
  Synthetic oligonucleotide
  Mismatch hsa-miR-5590-3p MIMAT0022300
ttgccatacacaaactttatt

SEQ ID NO: 6134 - DNA, 22 bp, Artificial Sequence
  Synthetic oligonucleotide
  Mismatch hsa-miR-24-3p MIMAT0000080
ctgttcctgctatactgagcca

SEQ ID NO: 6135 - DNA, 22 bp, Artificial Sequence
  Synthetic oligonucleotide
  Mismatch hsa-miR-6825-5p MIMAT0027550
atgctgactccttacctcccca

SEQ ID NO: 6136 - DNA, 22 bp, Artificial Sequence
  Synthetic oligonucleotide
  Mismatch hsa-miR-3934-5p MIMAT0018349
ctgcctcagttctcacacctga

SEQ ID NO: 6137 - DNA, 21 bp, Artificial Sequence
  Synthetic oligonucleotide
  Mismatch hsa-miR-6508-5p MIMAT0025472
ggtgggtcatatatttctaga

SEQ ID NO: 6138 - DNA, 20 bp, Artificial Sequence
  Synthetic oligonucleotide
  Mismatch hsa-miR-1238-3p MIMAT0005593
ggggcagactaacgaggaag

SEQ ID NO: 6139 - DNA, 22 bp, Artificial Sequence
  Synthetic oligonucleotide
  Mismatch hsa-miR-598-3p MIMAT0003266
tgacgatgacattgatgacgta

SEQ ID NO: 6140 - DNA, 23 bp, Artificial Sequence
  Synthetic oligonucleotide
  Mismatch hsa-miR-6773-5p MIMAT0027446
atcctgtttacttttgggcccaa

SEQ ID NO: 6141 - DNA, 20 bp, Artificial Sequence
  Synthetic oligonucleotide
  Mismatch hsa-miR-548an MIMAT0019079
caaaaaccattatgcctttt

SEQ ID NO: 6142 - DNA, 22 bp, Artificial Sequence
  Synthetic oligonucleotide
  Mismatch hsa-miR-134-5p MIMAT0000447
cccctctggtcttccagtcaca

SEQ ID NO: 6143 - DNA, 22 bp, Artificial Sequence
  Synthetic oligonucleotide
  Mismatch hsa-miR-7157-3p MIMAT0028225
actcttcatcctatagcacaga

SEQ ID NO: 6144 - DNA, 22 bp, Artificial Sequence
  Synthetic oligonucleotide
  Mismatch hsa-miR-4512 MIMAT0019049
tgggcgatacaacgaggccctg

SEQ ID NO: 6145 - DNA, 22 bp, Artificial Sequence
  Synthetic oligonucleotide
  Mismatch hsa-miR-6733-5p MIMAT0027367
aactctgagttcatctttccca

SEQ ID NO: 6146 - DNA, 22 bp, Artificial Sequence
  Synthetic oligonucleotide
  Mismatch hsa-miR-6749-5p MIMAT0027398
gctcccccaacttcaggcccga

SEQ ID NO: 6147 - DNA, 21 bp, Artificial Sequence
  Synthetic oligonucleotide
  Mismatch hsa-miR-182-3p MIMAT0000260
tagttggcaaacctagaacca

SEQ ID NO: 6148 - DNA, 22 bp, Artificial Sequence
  Synthetic oligonucleotide
  Mismatch hsa-miR-625-3p MIMAT0004808
tgagggggaaaactctatagtc

SEQ ID NO: 6149 - DNA, 22 bp, Artificial Sequence
  Synthetic oligonucleotide
  Mismatch hsa-miR-616-5p MIMAT0003284
aagtcactgaaaagttttgagt

SEQ ID NO: 6150 - DNA, 23 bp, Artificial Sequence
  Synthetic oligonucleotide
  Mismatch hsa-miR-138-5p MIMAT0000430
cggcctgattcattacaccagct

SEQ ID NO: 6151 - DNA, 20 bp, Artificial Sequence
  Synthetic oligonucleotide
  Mismatch hsa-miR-4448 MIMAT0018967
tacccctagttcaaggagcc

SEQ ID NO: 6152 - DNA, 18 bp, Artificial Sequence
  Synthetic oligonucleotide
  Mismatch hsa-miR-4430 MIMAT0018945
ctccgctttctccagcct

SEQ ID NO: 6153 - DNA, 21 bp, Artificial Sequence
  Synthetic oligonucleotide
  Mismatch hsa-miR-3117-3p MIMAT0014979
ctggcactattcgagtcctat

SEQ ID NO: 6154 - DNA, 23 bp, Artificial Sequence
  Synthetic oligonucleotide
  Mismatch hsa-miR-3065-3p MIMAT0015378
ctccaacaatattttggtgctga

SEQ ID NO: 6155 - DNA, 17 bp, Artificial Sequence
  Synthetic oligonucleotide
  Mismatch hsa-miR-6852-3p MIMAT0027605
ctgaggttcagaggaca

SEQ ID NO: 6156 - DNA, 22 bp, Artificial Sequence
  Synthetic oligonucleotide
  Mismatch hsa-miR-6505-5p MIMAT0025466
gctgagatatcttctattccaa

SEQ ID NO: 6157 - DNA, 23 bp, Artificial Sequence
  Synthetic oligonucleotide
  Mismatch hsa-miR-365a-5p MIMAT0009199
cacatctgccccttaaagtccct

SEQ ID NO: 6158 - DNA, 18 bp, Artificial Sequence
  Synthetic oligonucleotide
  Mismatch hsa-miR-6816-3p MIMAT0027533
cgaaggtataggtccttc

SEQ ID NO: 6159 - DNA, 22 bp, Artificial Sequence
  Synthetic oligonucleotide
  Mismatch hsa-miR-380-3p MIMAT0000735
aagatgtggactttattacata

SEQ ID NO: 6160 - DNA, 22 bp, Artificial Sequence
  Synthetic oligonucleotide
  Mismatch hsa-miR-539-3p MIMAT0022705
aaagaaattgtttttgtatgat

SEQ ID NO: 6161 - DNA, 19 bp, Artificial Sequence
  Synthetic oligonucleotide
  Mismatch hsa-miR-4487 MIMAT0019021
ctgcccttttgccagctct

SEQ ID NO: 6162 - DNA, 22 bp, Artificial Sequence
  Synthetic oligonucleotide
  Mismatch hsa-miR-548n MIMAT0005916
acaaaatccacttttacttttg

SEQ ID NO: 6163 - DNA, 23 bp, Artificial Sequence
  Synthetic oligonucleotide
  Mismatch hsa-miR-217 MIMAT0000274
tccaatcagttctcgatgcagta

SEQ ID NO: 6164 - DNA, 22 bp, Artificial Sequence
  Synthetic oligonucleotide
  Mismatch hsa-miR-892b MIMAT0004918
tctacccagaatagagccagtg

SEQ ID NO: 6165 - DNA, 22 bp, Artificial Sequence
  Synthetic oligonucleotide
  Mismatch hsa-miR-6805-5p MIMAT0027510
acactccacaaatcgcccccta

SEQ ID NO: 6166 - DNA, 22 bp, Artificial Sequence
  Synthetic oligonucleotide
  Mismatch hsa-miR-3942-5p MIMAT0018358
atttcaggtaattgtattgctt

SEQ ID NO: 6167 - DNA, 21 bp, Artificial Sequence
  Synthetic oligonucleotide
  Mismatch hsa-miR-1245b-5p MIMAT0019950
tttaagtgattcaaaggccta

SEQ ID NO: 6168 - DNA, 22 bp, Artificial Sequence
  Synthetic oligonucleotide
  Mismatch hsa-let-7e-3p MIMAT0004485
ggaaagctaggtagccgtatag

SEQ ID NO: 6169 - DNA, 22 bp, Artificial Sequence
  Synthetic oligonucleotide
  Mismatch hsa-miR-659-5p MIMAT0022710
tccttggttcaaagaaggtcct

SEQ ID NO: 6170 - DNA, 22 bp, Artificial Sequence
  Synthetic oligonucleotide
  Mismatch hsa-miR-3191-5p MIMAT0022732
tggaaggtagatagccagagag

SEQ ID NO: 6171 - DNA, 21 bp, Artificial Sequence
  Synthetic oligonucleotide
  Mismatch hsa-miR-6886-3p MIMAT0027673
aggcaggaggtaagaagggca

SEQ ID NO: 6172 - DNA, 22 bp, Artificial Sequence
  Synthetic oligonucleotide
  Mismatch hsa-miR-3180-3p MIMAT0015058
ggcctccggaaattccgcccca

SEQ ID NO: 6173 - DNA, 23 bp, Artificial Sequence
  Synthetic oligonucleotide
  Mismatch hsa-miR-2467-5p MIMAT0019952
gagccaaggctattagagcctca

SEQ ID NO: 6174 - DNA, 22 bp, Artificial Sequence
  Synthetic oligonucleotide
  Mismatch hsa-miR-5688 MIMAT0022479
gctgttttacaaatgtttgtta

SEQ ID NO: 6175 - DNA, 21 bp, Artificial Sequence
  Synthetic oligonucleotide
  Mismatch hsa-miR-6872-3p MIMAT0027645
gaccgcggcaaaaggcatggg

SEQ ID NO: 6176 - DNA, 21 bp, Artificial Sequence
  Synthetic oligonucleotide
  Mismatch hsa-miR-1288-3p MIMAT0005942
tctccagatctaggcagtcca

SEQ ID NO: 6177 - DNA, 23 bp, Artificial Sequence
  Synthetic oligonucleotide
  Mismatch hsa-miR-3679-5p MIMAT0018104
tccccttccctgttatatcctca

SEQ ID NO: 6178 - DNA, 23 bp, Artificial Sequence
  Synthetic oligonucleotide
  Mismatch hsa-miR-6867-5p MIMAT0027634
tcccttcttccttcacacacaca

SEQ ID NO: 6179 - DNA, 22 bp, Artificial Sequence
  Synthetic oligonucleotide
  Mismatch hsa-miR-4494 MIMAT0019029
cctctggtcagttacagtctgg

SEQ ID NO: 6180 - DNA, 22 bp, Artificial Sequence
  Synthetic oligonucleotide
  Mismatch hsa-miR-548c-5p MIMAT0004806
ggcaaaaaccgttattactttt

SEQ ID NO: 6181 - DNA, 23 bp, Artificial Sequence
  Synthetic oligonucleotide
  Mismatch hsa-miR-128-1-5p MIMAT0026477
tctcagacagtgtcacggccccg

SEQ ID NO: 6182 - DNA, 19 bp, Artificial Sequence
  Synthetic oligonucleotide
  Mismatch hsa-miR-7704 MIMAT0030019
cacgtcgctaccgaccccg

SEQ ID NO: 6183 - DNA, 22 bp, Artificial Sequence
  Synthetic oligonucleotide
  Mismatch hsa-miR-15b-3p MIMAT0004586
tagagcagcaatcaatgattcg

SEQ ID NO: 6184 - DNA, 22 bp, Artificial Sequence
  Synthetic oligonucleotide
  Mismatch hsa-miR-664b-3p MIMAT0022272
tgtaggctgggtagcaaatgaa

SEQ ID NO: 6185 - DNA, 24 bp, Artificial Sequence
  Synthetic oligonucleotide
  Mismatch hsa-miR-4697-3p MIMAT0019792
accaaggggcaggtatcactgaca

SEQ ID NO: 6186 - DNA, 22 bp, Artificial Sequence
  Synthetic oligonucleotide
  Mismatch hsa-miR-4645-3p MIMAT0019706
aaccaggcaagttctactgtct

SEQ ID NO: 6187 - DNA, 19 bp, Artificial Sequence
  Synthetic oligonucleotide
  Mismatch hsa-miR-4458 MIMAT0018980
ttcttccattcctacctct

SEQ ID NO: 6188 - DNA, 23 bp, Artificial Sequence
  Synthetic oligonucleotide
  Mismatch hsa-miR-181b-5p MIMAT0000257
acccaccgacagttatgaatgtt

SEQ ID NO: 6189 - DNA, 22 bp, Artificial Sequence
  Synthetic oligonucleotide
  Mismatch hsa-miR-196b-5p MIMAT0001080
cccaacaacagataactaccta

SEQ ID NO: 6190 - DNA, 22 bp, Artificial Sequence
  Synthetic oligonucleotide
  Mismatch hsa-miR-3934-3p MIMAT0022975
tcccagctgtgttacctgagca

SEQ ID NO: 6191 - DNA, 22 bp, Artificial Sequence
  Synthetic oligonucleotide
  Mismatch hsa-miR-219b-5p MIMAT0019747
cgagaattgtgattggacatct

SEQ ID NO: 6192 - DNA, 21 bp, Artificial Sequence
  Synthetic oligonucleotide
  Mismatch hsa-miR-4746-3p MIMAT0019881
tcggcccgcaaaagcaccgct

SEQ ID NO: 6193 - DNA, 23 bp, Artificial Sequence
  Synthetic oligonucleotide
  Mismatch hsa-miR-1266-5p MIMAT0005920
agccctgttctattgccctgagg

SEQ ID NO: 6194 - DNA, 22 bp, Artificial Sequence
  Synthetic oligonucleotide
  Mismatch hsa-miR-6791-5p MIMAT0027482
tccgcctgccctaccccagggg

SEQ ID NO: 6195 - DNA, 23 bp, Artificial Sequence
  Synthetic oligonucleotide
  Mismatch hsa-miR-409-5p MIMAT0001638
atgcaaagttgcctgggtaacct

SEQ ID NO: 6196 - DNA, 23 bp, Artificial Sequence
  Synthetic oligonucleotide
  Mismatch hsa-miR-508-5p MIMAT0004778
catgagtgacgctttctggagta

SEQ ID NO: 6197 - DNA, 22 bp, Artificial Sequence
  Synthetic oligonucleotide
  Mismatch hsa-miR-3909 MIMAT0018183
agactgcaggctttagaggaca

SEQ ID NO: 6198 - DNA, 22 bp, Artificial Sequence
  Synthetic oligonucleotide
  Mismatch hsa-miR-4504 MIMAT0019040
catgttcatcttcattgtcaca

SEQ ID NO: 6199 - DNA, 22 bp, Artificial Sequence
  Synthetic oligonucleotide
  Mismatch hsa-miR-6850-5p MIMAT0027600
cgccccggccaatgttccgcac

SEQ ID NO: 6200 - DNA, 22 bp, Artificial Sequence
  Synthetic oligonucleotide
  Mismatch hsa-miR-3683 MIMAT0018111
tgatactacttttaatgtcgca

SEQ ID NO: 6201 - DNA, 21 bp, Artificial Sequence
  Synthetic oligonucleotide
  Mismatch hsa-miR-587 MIMAT0003253
gtgactcatcttctatggaaa

SEQ ID NO: 6202 - DNA, 18 bp, Artificial Sequence
  Synthetic oligonucleotide
  Mismatch hsa-miR-4417 MIMAT0018929
ccctccgaaaagcccacc

SEQ ID NO: 6203 - DNA, 22 bp, Artificial Sequence
  Synthetic oligonucleotide
  Mismatch hsa-miR-4469 MIMAT0018996
tccgagcgacctcagagggagc

SEQ ID NO: 6204 - DNA, 22 bp, Artificial Sequence
  Synthetic oligonucleotide
  Mismatch hsa-miR-6804-3p MIMAT0027509
ctgtgggtgagtagcaggtgcg

SEQ ID NO: 6205 - DNA, 21 bp, Artificial Sequence
  Synthetic oligonucleotide
  Mismatch hsa-miR-510-3p MIMAT0026613
tccactcttaatggtttcaat

SEQ ID NO: 6206 - DNA, 22 bp, Artificial Sequence
  Synthetic oligonucleotide
  Mismatch hsa-miR-624-5p MIMAT0003293
tgaacacaaggctctggtacta

SEQ ID NO: 6207 - DNA, 19 bp, Artificial Sequence
  Synthetic oligonucleotide
  Mismatch hsa-miR-548ap-5p MIMAT0021037
aaagaccgttattactttt

SEQ ID NO: 6208 - DNA, 20 bp, Artificial Sequence
  Synthetic oligonucleotide
  Mismatch hsa-miR-3151-3p MIMAT0027026
aggtgggctacgggatcagg

SEQ ID NO: 6209 - DNA, 22 bp, Artificial Sequence
  Synthetic oligonucleotide
  Mismatch hsa-miR-1304-5p MIMAT0005892
cacatctcactacagcctcaaa

SEQ ID NO: 6210 - DNA, 22 bp, Artificial Sequence
  Synthetic oligonucleotide
  Mismatch hsa-miR-193b-5p MIMAT0004767
tcatctcgcccctaaaaccccg

SEQ ID NO: 6211 - DNA, 20 bp, Artificial Sequence
  Synthetic oligonucleotide
  Mismatch hsa-miR-6074 MIMAT0023699
ccacctagctcctgaatatc

SEQ ID NO: 6212 - DNA, 19 bp, Artificial Sequence
  Synthetic oligonucleotide
  Mismatch hsa-miR-7155-3p MIMAT0028221
ggtctgagaccttgggcca

SEQ ID NO: 6213 - DNA, 23 bp, Artificial Sequence
  Synthetic oligonucleotide
  Mismatch hsa-miR-8087 MIMAT0031014
cccctgtaatccttgaagtcttc

SEQ ID NO: 6214 - DNA, 23 bp, Artificial Sequence
  Synthetic oligonucleotide
  Mismatch hsa-miR-550a-5p MIMAT0004800
gggctcttactctttcaggcact

SEQ ID NO: 6215 - DNA, 22 bp, Artificial Sequence
  Synthetic oligonucleotide
  Mismatch hsa-miR-6510-5p MIMAT0025476
gactcctctcttccccctgctg

SEQ ID NO: 6216 - DNA, 23 bp, Artificial Sequence
  Synthetic oligonucleotide
  Mismatch hsa-miR-3605-5p MIMAT0017981
ggcttccttgcttcccatcctca

SEQ ID NO: 6217 - DNA, 20 bp, Artificial Sequence
  Synthetic oligonucleotide
  Mismatch hsa-miR-1268b MIMAT0018925
cacccccacttccacgcccg

SEQ ID NO: 6218 - DNA, 19 bp, Artificial Sequence
  Synthetic oligonucleotide
  Mismatch hsa-miR-6129 MIMAT0024613
tatacaccttactccctca

SEQ ID NO: 6219 - DNA, 22 bp, Artificial Sequence
  Synthetic oligonucleotide
  Mismatch hsa-miR-6857-5p MIMAT0027614
actggcctgacttaatccccaa

SEQ ID NO: 6220 - DNA, 23 bp, Artificial Sequence
  Synthetic oligonucleotide
  Mismatch hsa-miR-215-3p MIMAT0026476
tattggcctaaaataatgacaga

SEQ ID NO: 6221 - DNA, 22 bp, Artificial Sequence
  Synthetic oligonucleotide
  Mismatch hsa-miR-30b-3p MIMAT0004589
gaagtaaacatttacctcccag

SEQ ID NO: 6222 - DNA, 21 bp, Artificial Sequence
  Synthetic oligonucleotide
  Mismatch hsa-miR-4687-3p MIMAT0019775
gcctgcccccctcaacagcca

SEQ ID NO: 6223 - DNA, 22 bp, Artificial Sequence
  Synthetic oligonucleotide
  Mismatch hsa-miR-4794 MIMAT0019967
acagtctcgtgtaatagccaga

SEQ ID NO: 6224 - DNA, 20 bp, Artificial Sequence
  Synthetic oligonucleotide
  Mismatch hsa-miR-6727-3p MIMAT0027356
ctgcggaggtagtggcagga

SEQ ID NO: 6225 - DNA, 23 bp, Artificial Sequence
  Synthetic oligonucleotide
  Mismatch hsa-miR-516a-5p MIMAT0004770
gaaagtgcttctcccctcgagaa

SEQ ID NO: 6226 - DNA, 24 bp, Artificial Sequence
  Synthetic oligonucleotide
  Mismatch hsa-miR-6806-5p MIMAT0027512
cctgggccctgccctatgcctaca

SEQ ID NO: 6227 - DNA, 23 bp, Artificial Sequence
  Synthetic oligonucleotide
  Mismatch hsa-miR-29b-3p MIMAT0000100
aacactgatttcttatggtgcta

SEQ ID NO: 6228 - DNA, 22 bp, Artificial Sequence
  Synthetic oligonucleotide
  Mismatch hsa-miR-4713-3p MIMAT0019821
ttctcccactgcttggatccca

SEQ ID NO: 6229 - DNA, 22 bp, Artificial Sequence
  Synthetic oligonucleotide
  Mismatch hsa-miR-6755-3p MIMAT0027411
ctagggaaaaattatgacaaca

SEQ ID NO: 6230 - DNA, 21 bp, Artificial Sequence
  Synthetic oligonucleotide
  Mismatch hsa-miR-4433b-5p MIMAT0030413
acaggagtggaagtgggacat

SEQ ID NO: 6231 - DNA, 22 bp, Artificial Sequence
  Synthetic oligonucleotide
  Mismatch hsa-miR-4659b-3p MIMAT0019734
agctgccatgttcaagaagaaa

SEQ ID NO: 6232 - DNA, 22 bp, Artificial Sequence
  Synthetic oligonucleotide
  Mismatch hsa-miR-8052 MIMAT0030979
gctcatgcccttcacagtcccg

SEQ ID NO: 6233 - DNA, 23 bp, Artificial Sequence
  Synthetic oligonucleotide
  Mismatch hsa-miR-6513-5p MIMAT0025482
agacatgtggcgctaatcccaaa

SEQ ID NO: 6234 - DNA, 20 bp, Artificial Sequence
  Synthetic oligonucleotide
  Mismatch hsa-miR-6872-5p MIMAT0027644
ccttgcctctcgatgcgaga

SEQ ID NO: 6235 - DNA, 21 bp, Artificial Sequence
  Synthetic oligonucleotide
  Mismatch hsa-miR-5011-5p MIMAT0021045
gagtgcatggtcgtatatata

SEQ ID NO: 6236 - DNA, 21 bp, Artificial Sequence
  Synthetic oligonucleotide
  Mismatch hsa-miR-431-5p MIMAT0001625
tgcatgacggtttgcaagaca

SEQ ID NO: 6237 - DNA, 24 bp, Artificial Sequence
  Synthetic oligonucleotide
  Mismatch hsa-miR-7974 MIMAT0031177
gggctcaggagagtttcacagcct

SEQ ID NO: 6238 - DNA, 23 bp, Artificial Sequence
  Synthetic oligonucleotide
  Mismatch hsa-miR-6768-5p MIMAT0027436
cagggccccgctcctcctgtgtg

SEQ ID NO: 6239 - DNA, 22 bp, Artificial Sequence
  Synthetic oligonucleotide
  Mismatch hsa-miR-6516-3p MIMAT0030418
tgtttgcagtactatacatgat

SEQ ID NO: 6240 - DNA, 22 bp, Artificial Sequence
  Synthetic oligonucleotide
  Mismatch hsa-miR-200b-3p MIMAT0000318
tcatcattacctagcagtatta

SEQ ID NO: 6241 - DNA, 21 bp, Artificial Sequence
  Synthetic oligonucleotide
  Mismatch hsa-miR-548ar-5p MIMAT0022265
gcaaaaactgttattactttt

SEQ ID NO: 6242 - DNA, 17 bp, Artificial Sequence
  Synthetic oligonucleotide
  Mismatch hsa-miR-3201 MIMAT0015086
attttttctcatatccc

SEQ ID NO: 6243 - DNA, 24 bp, Artificial Sequence
  Synthetic oligonucleotide
  Mismatch hsa-miR-1249-5p MIMAT0032029
aacttggcccatcctctccctcct

SEQ ID NO: 6244 - DNA, 22 bp, Artificial Sequence
  Synthetic oligonucleotide
  Mismatch hsa-miR-6499-5p MIMAT0025450
actgcagtgcttctgcgcccga

SEQ ID NO: 6245 - DNA, 22 bp, Artificial Sequence
  Synthetic oligonucleotide
  Mismatch hsa-miR-1305 MIMAT0005893
tctctcccatttaagttgaaaa

SEQ ID NO: 6246 - DNA, 22 bp, Artificial Sequence
  Synthetic oligonucleotide
  Mismatch hsa-miR-937-3p MIMAT0004980
ggcagagagtctaagcgcggat

SEQ ID NO: 6247 - DNA, 21 bp, Artificial Sequence
  Synthetic oligonucleotide
  Mismatch hsa-miR-432-3p MIMAT0002815
agacatggagatgccatccag

SEQ ID NO: 6248 - DNA, 22 bp, Artificial Sequence
  Synthetic oligonucleotide
  Mismatch hsa-miR-6870-3p MIMAT0027641
ctgaaaggagacagggatgagc

SEQ ID NO: 6249 - DNA, 21 bp, Artificial Sequence
  Synthetic oligonucleotide
  Mismatch hsa-miR-6510-3p MIMAT0025477
ctgcaggagattgagtcggtg

SEQ ID NO: 6250 - DNA, 21 bp, Artificial Sequence
  Synthetic oligonucleotide
  Mismatch hsa-miR-3660 MIMAT0018081
tcaaaatgcttccctgtcagt

SEQ ID NO: 6251 - DNA, 20 bp, Artificial Sequence
  Synthetic oligonucleotide
  Mismatch hsa-miR-550b-3p MIMAT0018445
cagtgcctgtaggagtaaga

SEQ ID NO: 6252 - DNA, 21 bp, Artificial Sequence
  Synthetic oligonucleotide
  Mismatch hsa-miR-606 MIMAT0003274
atctttgattcccagtagttt

SEQ ID NO: 6253 - DNA, 19 bp, Artificial Sequence
  Synthetic oligonucleotide
  Mismatch hsa-miR-3180 MIMAT0018178
ctccggaaattccgcccca

SEQ ID NO: 6254 - DNA, 23 bp, Artificial Sequence
  Synthetic oligonucleotide
  Mismatch hsa-miR-421 MIMAT0003339
gcgcccaattaacatctgttgat

SEQ ID NO: 6255 - DNA, 22 bp, Artificial Sequence
  Synthetic oligonucleotide
  Mismatch hsa-miR-519e-3p MIMAT0002829
aacactctaaatagaggcactt

SEQ ID NO: 6256 - DNA, 21 bp, Artificial Sequence
  Synthetic oligonucleotide
  Mismatch hsa-miR-151a-5p MIMAT0004697
actagactgtatgctcctcga

SEQ ID NO: 6257 - DNA, 20 bp, Artificial Sequence
  Synthetic oligonucleotide
  Mismatch hsa-miR-378g MIMAT0018937
cttctgactttaagcccagt

SEQ ID NO: 6258 - DNA, 22 bp, Artificial Sequence
  Synthetic oligonucleotide
  Mismatch hsa-miR-29a-5p MIMAT0004503
ctgaacaccaattgaaatcagt

SEQ ID NO: 6259 - DNA, 21 bp, Artificial Sequence
  Synthetic oligonucleotide
  Mismatch hsa-miR-6891-3p MIMAT0027683
gaaaggagggatagatgaggg

SEQ ID NO: 6260 - DNA, 21 bp, Artificial Sequence
  Synthetic oligonucleotide
  Mismatch hsa-miR-6894-3p MIMAT0027689
ctggaggaagtaggcaggcaa

SEQ ID NO: 6261 - DNA, 22 bp, Artificial Sequence
  Synthetic oligonucleotide
  Mismatch hsa-miR-521 MIMAT0002854
acactctaaagaaaagtgcgtt

SEQ ID NO: 6262 - DNA, 23 bp, Artificial Sequence
  Synthetic oligonucleotide
  Mismatch hsa-miR-518c-5p MIMAT0002847
cagaaagtgcttttctccagaga

SEQ ID NO: 6263 - DNA, 19 bp, Artificial Sequence
  Synthetic oligonucleotide
  Mismatch hsa-miR-646 MIMAT0003316
gcctcagaaacagctgctt

SEQ ID NO: 6264 - DNA, 22 bp, Artificial Sequence
  Synthetic oligonucleotide
  Mismatch hsa-miR-4788 MIMAT0019958
gcctcccttagtcggtccgtaa

SEQ ID NO: 6265 - DNA, 22 bp, Artificial Sequence
  Synthetic oligonucleotide
  Mismatch hsa-miR-590-5p MIMAT0003258
ctgcacttttacaaataagctc

SEQ ID NO: 6266 - DNA, 17 bp, Artificial Sequence
  Synthetic oligonucleotide
  Mismatch hsa-miR-4483 MIMAT0019017
caacaattgaccacccc

SEQ ID NO: 6267 - DNA, 17 bp, Artificial Sequence
  Synthetic oligonucleotide
  Mismatch hsa-miR-1281 MIMAT0005939
gggagaaaaggaggcga

SEQ ID NO: 6268 - DNA, 22 bp, Artificial Sequence
  Synthetic oligonucleotide
  Mismatch hsa-miR-5192 MIMAT0021123
accacctggaactcactctcct

SEQ ID NO: 6269 - DNA, 21 bp, Artificial Sequence
  Synthetic oligonucleotide
  Mismatch hsa-miR-3657 MIMAT0018077
aatcaccaattttgggacaca

SEQ ID NO: 6270 - DNA, 22 bp, Artificial Sequence
  Synthetic oligonucleotide
  Mismatch hsa-miR-148a-3p MIMAT0000243
acaaagttctgctgtgcactga

SEQ ID NO: 6271 - DNA, 23 bp, Artificial Sequence
  Synthetic oligonucleotide
  Mismatch hsa-miR-4691-5p MIMAT0019781
ccgcagctcatgatctggaggac

SEQ ID NO: 6272 - DNA, 21 bp, Artificial Sequence
  Synthetic oligonucleotide
  Mismatch hsa-miR-3151-5p MIMAT0015024
acctgatccctctgccccacc

SEQ ID NO: 6273 - DNA, 21 bp, Artificial Sequence
  Synthetic oligonucleotide
  Mismatch hsa-miR-8054 MIMAT0030981
acccatccgacttgtactttc

SEQ ID NO: 6274 - DNA, 22 bp, Artificial Sequence
  Synthetic oligonucleotide
  Mismatch hsa-miR-4482-3p MIMAT0020958
gagccccactgtaaaatagaaa

SEQ ID NO: 6275 - DNA, 23 bp, Artificial Sequence
  Synthetic oligonucleotide
  Mismatch hsa-miR-412-5p MIMAT0026557
attactttccaatcggtcgacca

SEQ ID NO: 6276 - DNA, 21 bp, Artificial Sequence
  Synthetic oligonucleotide
  Mismatch hsa-miR-6851-3p MIMAT0027603
ctggaggggtttaaagggcca

SEQ ID NO: 6277 - DNA, 22 bp, Artificial Sequence
  Synthetic oligonucleotide
  Mismatch hsa-miR-6502-5p MIMAT0025460
ggtcaacaatccctctagagct

SEQ ID NO: 6278 - DNA, 21 bp, Artificial Sequence
  Synthetic oligonucleotide
  Mismatch hsa-miR-2113 MIMAT0009206
gtgacagagcttagcacaaat

SEQ ID NO: 6279 - DNA, 22 bp, Artificial Sequence
  Synthetic oligonucleotide
  Mismatch hsa-miR-570-3p MIMAT0003235
gcaaaggtaatcactgttttcg

SEQ ID NO: 6280 - DNA, 21 bp, Artificial Sequence
  Synthetic oligonucleotide
  Mismatch hsa-miR-6736-3p MIMAT0027374
ctgtgggtagtaaggagctga

SEQ ID NO: 6281 - DNA, 23 bp, Artificial Sequence
  Synthetic oligonucleotide
  Mismatch hsa-miR-4757-5p MIMAT0019901
acaccgtgacgtttcagaggcct

SEQ ID NO: 6282 - DNA, 22 bp, Artificial Sequence
  Synthetic oligonucleotide
  Mismatch hsa-miR-3135a MIMAT0015001
cactgcagtctttgcctaggca

SEQ ID NO: 6283 - DNA, 20 bp, Artificial Sequence
  Synthetic oligonucleotide
  Mismatch hsa-miR-324-3p MIMAT0000762
ccagcagcatttggggcagt

SEQ ID NO: 6284 - DNA, 21 bp, Artificial Sequence
  Synthetic oligonucleotide
  Mismatch hsa-miR-622 MIMAT0003291
gctccaacctttgcagactgt

SEQ ID NO: 6285 - DNA, 19 bp, Artificial Sequence
  Synthetic oligonucleotide
  Mismatch hsa-miR-5571-3p MIMAT0022258
cagaggagtttcctaggac

SEQ ID NO: 6286 - DNA, 21 bp, Artificial Sequence
  Synthetic oligonucleotide
  Mismatch hsa-miR-581 MIMAT0003246
actgatctagtaaacacaaga

SEQ ID NO: 6287 - DNA, 23 bp, Artificial Sequence
  Synthetic oligonucleotide
  Mismatch hsa-miR-7156-3p MIMAT0028223
accagttccccatatggctgcag

SEQ ID NO: 6288 - DNA, 24 bp, Artificial Sequence
  Synthetic oligonucleotide
  Mismatch hsa-miR-520g-3p MIMAT0002858
acactctaaagggttgcactttgt

SEQ ID NO: 6289 - DNA, 18 bp, Artificial Sequence
  Synthetic oligonucleotide
  Mismatch hsa-miR-1207-3p MIMAT0005872
gaaatgaaagccagctga

SEQ ID NO: 6290 - DNA, 21 bp, Artificial Sequence
  Synthetic oligonucleotide
  Mismatch hsa-miR-506-3p MIMAT0002878
tctactcagataggtgcctta

SEQ ID NO: 6291 - DNA, 22 bp, Artificial Sequence
  Synthetic oligonucleotide
  Mismatch hsa-miR-6811-5p MIMAT0027522
agtgctgtacattggcctgcat

SEQ ID NO: 6292 - DNA, 25 bp, Artificial Sequence
  Synthetic oligonucleotide
  Mismatch hsa-miR-6775-5p MIMAT0027450
ccagcctccctcccttatgccccga

SEQ ID NO: 6293 - DNA, 22 bp, Artificial Sequence
  Synthetic oligonucleotide
  Mismatch hsa-miR-6748-5p MIMAT0027396
aatccagtcctctccacccaca

SEQ ID NO: 6294 - DNA, 22 bp, Artificial Sequence
  Synthetic oligonucleotide
  Mismatch hsa-miR-1273h-3p MIMAT0030416
gcctgggaggttaagtctgcag

SEQ ID NO: 6295 - DNA, 22 bp, Artificial Sequence
  Synthetic oligonucleotide
  Mismatch hsa-miR-31-3p MIMAT0004504
atggcaatatgccggcatagca

SEQ ID NO: 6296 - DNA, 21 bp, Artificial Sequence
  Synthetic oligonucleotide
  Mismatch hsa-miR-676-5p MIMAT0018203
tgcaagtcctatggttgaaga

SEQ ID NO: 6297 - DNA, 22 bp, Artificial Sequence
  Synthetic oligonucleotide
  Mismatch hsa-miR-2115-3p MIMAT0011159
ctagcctccatatattctgatg

SEQ ID NO: 6298 - DNA, 22 bp, Artificial Sequence
  Synthetic oligonucleotide
  Mismatch hsa-miR-7152-5p MIMAT0028214
ggtctggttggtagacaggaaa

SEQ ID NO: 6299 - DNA, 22 bp, Artificial Sequence
  Synthetic oligonucleotide
  Mismatch hsa-miR-4460 MIMAT0018982
aaggtaaattcttaaccactat

SEQ ID NO: 6300 - DNA, 22 bp, Artificial Sequence
  Synthetic oligonucleotide
  Mismatch hsa-miR-5681a MIMAT0022469
aagaggtattgttaccctttct

SEQ ID NO: 6301 - DNA, 23 bp, Artificial Sequence
  Synthetic oligonucleotide
  Mismatch hsa-miR-3974 MIMAT0019359
gcattaaccttattatgaccttt

SEQ ID NO: 6302 - DNA, 20 bp, Artificial Sequence
  Synthetic oligonucleotide
  Mismatch hsa-miR-6083 MIMAT0023708
cccacagcccttgatataag

SEQ ID NO: 6303 - DNA, 23 bp, Artificial Sequence
  Synthetic oligonucleotide
  Mismatch hsa-miR-7156-5p MIMAT0028222
tctgacagccagcctgagaacaa

SEQ ID NO: 6304 - DNA, 22 bp, Artificial Sequence
  Synthetic oligonucleotide
  Mismatch hsa-miR-6802-3p MIMAT0027505
ctgcttaggtgtaaggggtgaa

SEQ ID NO: 6305 - DNA, 23 bp, Artificial Sequence
  Synthetic oligonucleotide
  Mismatch hsa-miR-6780a-5p MIMAT0027460
tctccagctgtcccccctcccaa

SEQ ID NO: 6306 - DNA, 22 bp, Artificial Sequence
  Synthetic oligonucleotide
  Mismatch hsa-miR-484 MIMAT0002174
atcgggaggggtttgagcctga

SEQ ID NO: 6307 - DNA, 24 bp, Artificial Sequence
  Synthetic oligonucleotide
  Mismatch hsa-miR-6770-5p MIMAT0027440
tcacgtgcaagctacgccttctca

SEQ ID NO: 6308 - DNA, 21 bp, Artificial Sequence
  Synthetic oligonucleotide
  Mismatch hsa-miR-382-3p MIMAT0022697
aagtgttgtctatgaatgatt

SEQ ID NO: 6309 - DNA, 22 bp, Artificial Sequence
  Synthetic oligonucleotide
  Mismatch hsa-miR-4752 MIMAT0019889
agcacatccttatgatccacaa

SEQ ID NO: 6310 - DNA, 22 bp, Artificial Sequence
  Synthetic oligonucleotide
  Mismatch hsa-miR-4701-5p MIMAT0019798
aaggggtaggtacggtggccaa

SEQ ID NO: 6311 - DNA, 23 bp, Artificial Sequence
  Synthetic oligonucleotide
  Mismatch hsa-miR-6848-5p MIMAT0027596
accatggcccatttcagccccca

SEQ ID NO: 6312 - DNA, 23 bp, Artificial Sequence
  Synthetic oligonucleotide
  Mismatch hsa-miR-6724-5p MIMAT0025856
ccccacgcccgctacgggcccag

SEQ ID NO: 6313 - DNA, 20 bp, Artificial Sequence
  Synthetic oligonucleotide
  Mismatch hsa-miR-124-3p MIMAT0000422
ggcattcactacgtgcctta

SEQ ID NO: 6314 - DNA, 22 bp, Artificial Sequence
  Synthetic oligonucleotide
  Mismatch hsa-miR-3923 MIMAT0018198
ccctaatccaattttactagtt

SEQ ID NO: 6315 - DNA, 21 bp, Artificial Sequence
  Synthetic oligonucleotide
  Mismatch hsa-miR-4422 MIMAT0018935
tgggtacttctcgatgctttt

SEQ ID NO: 6316 - DNA, 22 bp, Artificial Sequence
  Synthetic oligonucleotide
  Mismatch hsa-miR-96-3p MIMAT0004510
catattggcaccacacatgatt

SEQ ID NO: 6317 - DNA, 17 bp, Artificial Sequence
  Synthetic oligonucleotide
  Mismatch hsa-miR-4441 MIMAT0018959
tacaattccctccctgt

SEQ ID NO: 6318 - DNA, 17 bp, Artificial Sequence
  Synthetic oligonucleotide
  Mismatch hsa-miR-4535 MIMAT0019075
gtcccaatcaggtccac

SEQ ID NO: 6319 - DNA, 21 bp, Artificial Sequence
  Synthetic oligonucleotide
  Mismatch hsa-miR-6831-3p MIMAT0027563
ctgtagagtgaaagttagtca

SEQ ID NO: 6320 - DNA, 21 bp, Artificial Sequence
  Synthetic oligonucleotide
  Mismatch hsa-miR-4676-5p MIMAT0019758
tcactgtctcttcactggctc

SEQ ID NO: 6321 - DNA, 24 bp, Artificial Sequence
  Synthetic oligonucleotide
  Mismatch hsa-miR-1324 MIMAT0005956
gaaagtgcatagatctctgtctgg

SEQ ID NO: 6322 - DNA, 19 bp, Artificial Sequence
  Synthetic oligonucleotide
  Mismatch hsa-miR-320d MIMAT0006764
tcctctcattccagctttt

SEQ ID NO: 6323 - DNA, 23 bp, Artificial Sequence
  Synthetic oligonucleotide
  Mismatch hsa-miR-526b-5p MIMAT0002835
acagaaagtgctctcctcaagag

SEQ ID NO: 6324 - DNA, 22 bp, Artificial Sequence
  Synthetic oligonucleotide
  Mismatch hsa-miR-3620-5p MIMAT0022967
ggcccagcccaatccagcccac

SEQ ID NO: 6325 - DNA, 21 bp, Artificial Sequence
  Synthetic oligonucleotide
  Mismatch hsa-miR-3926 MIMAT0018201
tctctgcctgtcttttggcca

SEQ ID NO: 6326 - DNA, 22 bp, Artificial Sequence
  Synthetic oligonucleotide
  Mismatch hsa-miR-95-3p MIMAT0000094
tgctcaataaactcccgttgaa

SEQ ID NO: 6327 - DNA, 22 bp, Artificial Sequence
  Synthetic oligonucleotide
  Mismatch hsa-miR-4688 MIMAT0019777
cccaggtcctccactgccccta

SEQ ID NO: 6328 - DNA, 21 bp, Artificial Sequence
  Synthetic oligonucleotide
  Mismatch hsa-miR-222-3p MIMAT0000279
acccagtagcttgatgtagct

SEQ ID NO: 6329 - DNA, 22 bp, Artificial Sequence
  Synthetic oligonucleotide
  Mismatch hsa-miR-617 MIMAT0003286
gccaccttcaatcgggaagtct

SEQ ID NO: 6330 - DNA, 21 bp, Artificial Sequence
  Synthetic oligonucleotide
  Mismatch hsa-miR-6865-3p MIMAT0027631
ggcggtagggttagagggtgt

SEQ ID NO: 6331 - DNA, 18 bp, Artificial Sequence
  Synthetic oligonucleotide
  Mismatch hsa-miR-4285 MIMAT0016913
atgagtcaaactcgccgc

SEQ ID NO: 6332 - DNA, 21 bp, Artificial Sequence
  Synthetic oligonucleotide
  Mismatch hsa-miR-1178-3p MIMAT0005823
ctagggaagattagtgagcaa

SEQ ID NO: 6333 - DNA, 22 bp, Artificial Sequence
  Synthetic oligonucleotide
  Mismatch hsa-miR-4796-5p MIMAT0019970
gtaaagtgacaatgtatagaca

SEQ ID NO: 6334 - DNA, 17 bp, Artificial Sequence
  Synthetic oligonucleotide
  Mismatch hsa-miR-1297 MIMAT0005886
cacctgttttacttgaa

SEQ ID NO: 6335 - DNA, 22 bp, Artificial Sequence
  Synthetic oligonucleotide
  Mismatch hsa-miR-7852-3p MIMAT0030427
aaatgcctttgtttactacata

SEQ ID NO: 6336 - DNA, 20 bp, Artificial Sequence
  Synthetic oligonucleotide
  Mismatch hsa-miR-1208 MIMAT0005873
tccgcctgttcgaacagtga

SEQ ID NO: 6337 - DNA, 21 bp, Artificial Sequence
  Synthetic oligonucleotide
  Mismatch hsa-miR-4522 MIMAT0019060
accggcctactagcagagtca

SEQ ID NO: 6338 - DNA, 22 bp, Artificial Sequence
  Synthetic oligonucleotide
  Mismatch hsa-miR-34c-3p MIMAT0004677
cctggccgtgtaattagtgatt

SEQ ID NO: 6339 - DNA, 22 bp, Artificial Sequence
  Synthetic oligonucleotide
  Mismatch hsa-miR-6784-3p MIMAT0027469
ctggggcagagccggggtgaga

SEQ ID NO: 6340 - DNA, 23 bp, Artificial Sequence
  Synthetic oligonucleotide
  Mismatch hsa-miR-767-3p MIMAT0003883
agaaaccatgggacatgagcaga

SEQ ID NO: 6341 - DNA, 22 bp, Artificial Sequence
  Synthetic oligonucleotide
  Mismatch hsa-miR-6771-5p MIMAT0027442
gcctggcccatatcctcccgag

SEQ ID NO: 6342 - DNA, 22 bp, Artificial Sequence
  Synthetic oligonucleotide
  Mismatch hsa-miR-6875-3p MIMAT0027651
atggagccaggataggaagaat

SEQ ID NO: 6343 - DNA, 21 bp, Artificial Sequence
  Synthetic oligonucleotide
  Mismatch hsa-miR-1253 MIMAT0005904
tgcaggctgactttcttctct

SEQ ID NO: 6344 - DNA, 21 bp, Artificial Sequence
  Synthetic oligonucleotide
  Mismatch hsa-miR-4764-5p MIMAT0019914
agataactccccccacatcca

SEQ ID NO: 6345 - DNA, 21 bp, Artificial Sequence
  Synthetic oligonucleotide
  Mismatch hsa-miR-6789-3p MIMAT0027479
ctggaggagattcgggcgccg

SEQ ID NO: 6346 - DNA, 23 bp, Artificial Sequence
  Synthetic oligonucleotide
  Mismatch hsa-miR-134-3p MIMAT0026481
ttggtgactaggcagcccacagg

SEQ ID NO: 6347 - DNA, 22 bp, Artificial Sequence
  Synthetic oligonucleotide
  Mismatch hsa-miR-936 MIMAT0004979
ctgcgattcctttctctactgt

SEQ ID NO: 6348 - DNA, 25 bp, Artificial Sequence
  Synthetic oligonucleotide
  Mismatch hsa-miR-921 MIMAT0004971
gaatcctggttctgctcctcactag

SEQ ID NO: 6349 - DNA, 22 bp, Artificial Sequence
  Synthetic oligonucleotide
  Mismatch hsa-miR-193a-3p MIMAT0000459
actgggactttacaggccagtt

SEQ ID NO: 6350 - DNA, 21 bp, Artificial Sequence
  Synthetic oligonucleotide
  Mismatch hsa-miR-1185-5p MIMAT0005798
aacatacaaaaagtatcctct

SEQ ID NO: 6351 - DNA, 23 bp, Artificial Sequence
  Synthetic oligonucleotide
  Mismatch hsa-miR-6847-5p MIMAT0027594
gctcacactccatcgtcctctgt

SEQ ID NO: 6352 - DNA, 20 bp, Artificial Sequence
  Synthetic oligonucleotide
  Mismatch hsa-miR-1199-5p MIMAT0031119
ctgcgcggcttgggctcagg

SEQ ID NO: 6353 - DNA, 21 bp, Artificial Sequence
  Synthetic oligonucleotide
  Mismatch hsa-miR-4655-3p MIMAT0019722
ccccggggactcgacgagggt

SEQ ID NO: 6354 - DNA, 21 bp, Artificial Sequence
  Synthetic oligonucleotide
  Mismatch hsa-miR-6833-3p MIMAT0027567
ctgaggaagtaaagagagaaa

SEQ ID NO: 6355 - DNA, 22 bp, Artificial Sequence
  Synthetic oligonucleotide
  Mismatch hsa-miR-1277-3p MIMAT0005933
aaaatacatattcatctacgta

SEQ ID NO: 6356 - DNA, 23 bp, Artificial Sequence
  Synthetic oligonucleotide
  Mismatch hsa-miR-4776-3p MIMAT0019933
atgcagtggacctagatggcaag

SEQ ID NO: 6357 - DNA, 23 bp, Artificial Sequence
  Synthetic oligonucleotide
  Mismatch hsa-miR-1538 MIMAT0007400
aggaacagcagctacccgggccg

SEQ ID NO: 6358 - DNA, 22 bp, Artificial Sequence
  Synthetic oligonucleotide
  Mismatch hsa-miR-3116 MIMAT0014978
agtccctactacattccaggca

SEQ ID NO: 6359 - DNA, 22 bp, Artificial Sequence
  Synthetic oligonucleotide
  Mismatch hsa-miR-208a-3p MIMAT0000241
acaagctttttattcgtcttat

SEQ ID NO: 6360 - DNA, 22 bp, Artificial Sequence
  Synthetic oligonucleotide
  Mismatch hsa-miR-30c-2-3p MIMAT0004550
agagtaaacagttttctcccag

SEQ ID NO: 6361 - DNA, 22 bp, Artificial Sequence
  Synthetic oligonucleotide
  Mismatch hsa-miR-30e-3p MIMAT0000693
gctgtaaacatttgactgaaag

SEQ ID NO: 6362 - DNA, 23 bp, Artificial Sequence
  Synthetic oligonucleotide
  Mismatch hsa-miR-149-5p MIMAT0000450
gggagtgaagacttggagccaga

SEQ ID NO: 6363 - DNA, 22 bp, Artificial Sequence
  Synthetic oligonucleotide
  Mismatch hsa-miR-4646-5p MIMAT0019707
tccctcagctctccttcccagt

SEQ ID NO: 6364 - DNA, 22 bp, Artificial Sequence
  Synthetic oligonucleotide
  Mismatch hsa-miR-3198 MIMAT0015083
tctccattcccttggactccac

SEQ ID NO: 6365 - DNA, 23 bp, Artificial Sequence
  Synthetic oligonucleotide
  Mismatch hsa-miR-221-3p MIMAT0000278
gaaacccagcagttaatgtagct

SEQ ID NO: 6366 - DNA, 23 bp, Artificial Sequence
  Synthetic oligonucleotide
  Mismatch hsa-miR-3139 MIMAT0015007
aacaggcatctgccgagctccta

SEQ ID NO: 6367 - DNA, 22 bp, Artificial Sequence
  Synthetic oligonucleotide
  Mismatch hsa-miR-520f-5p MIMAT0026609
agaaagcgcttttctttagagg

SEQ ID NO: 6368 - DNA, 21 bp, Artificial Sequence
  Synthetic oligonucleotide
  Mismatch hsa-miR-4999-5p MIMAT0021017
tcactacctgttaatacagca

SEQ ID NO: 6369 - DNA, 22 bp, Artificial Sequence
  Synthetic oligonucleotide
  Mismatch hsa-miR-20b-3p MIMAT0004752
ctggaagtgcctttactacagt

SEQ ID NO: 6370 - DNA, 23 bp, Artificial Sequence
  Synthetic oligonucleotide
  Mismatch hsa-miR-5188 MIMAT0021119
ctccggtttaaacaggtccgatt

SEQ ID NO: 6371 - DNA, 21 bp, Artificial Sequence
  Synthetic oligonucleotide
  Mismatch hsa-miR-652-3p MIMAT0003322
cacaaccctaacggcgccatt

SEQ ID NO: 6372 - DNA, 20 bp, Artificial Sequence
  Synthetic oligonucleotide
  Mismatch hsa-miR-4737 MIMAT0019863
cactgtcagtttcctcgcat

SEQ ID NO: 6373 - DNA, 17 bp, Artificial Sequence
  Synthetic oligonucleotide
  Mismatch hsa-miR-3656 MIMAT0018076
ccacccttgcacccgcc

SEQ ID NO: 6374 - DNA, 23 bp, Artificial Sequence
  Synthetic oligonucleotide
  Mismatch hsa-miR-498 MIMAT0002824
gaaaaacgcccctcggcttgaaa

SEQ ID NO: 6375 - DNA, 22 bp, Artificial Sequence
  Synthetic oligonucleotide
  Mismatch hsa-miR-4734 MIMAT0019859
cgccctgaccgttgcccgcagc

SEQ ID NO: 6376 - DNA, 22 bp, Artificial Sequence
  Synthetic oligonucleotide
  Mismatch hsa-miR-1469 MIMAT0007347
ggagcccgcgcttcgcgccgag

SEQ ID NO: 6377 - DNA, 22 bp, Artificial Sequence
  Synthetic oligonucleotide
  Mismatch hsa-miR-4490 MIMAT0019025
tatgcccaaattccttaccaga

SEQ ID NO: 6378 - DNA, 19 bp, Artificial Sequence
  Synthetic oligonucleotide
  Mismatch hsa-miR-4260 MIMAT0016881
tgggactctttgccccaag

SEQ ID NO: 6379 - DNA, 22 bp, Artificial Sequence
  Synthetic oligonucleotide
  Mismatch hsa-miR-2115-5p MIMAT0011158
tccatcaggagctatggaagct

SEQ ID NO: 6380 - DNA, 22 bp, Artificial Sequence
  Synthetic oligonucleotide
  Mismatch hsa-miR-5681b MIMAT0022480
actagaaagggcagcaatacct

SEQ ID NO: 6381 - DNA, 22 bp, Artificial Sequence
  Synthetic oligonucleotide
  Mismatch hsa-miR-4662a-5p MIMAT0019731
ctaaagatggattattggctaa

SEQ ID NO: 6382 - DNA, 23 bp, Artificial Sequence
  Synthetic oligonucleotide
  Mismatch hsa-miR-633 MIMAT0003303
tttattgtggtaattactattag

SEQ ID NO: 6383 - DNA, 20 bp, Artificial Sequence
  Synthetic oligonucleotide
  Mismatch hsa-miR-6084 MIMAT0023709
ccggccaccatctggcggaa

SEQ ID NO: 6384 - DNA, 22 bp, Artificial Sequence
  Synthetic oligonucleotide
  Mismatch hsa-miR-4471 MIMAT0018998
ttaaacctctatcaagttccca

SEQ ID NO: 6385 - DNA, 21 bp, Artificial Sequence
  Synthetic oligonucleotide
  Mismatch hsa-miR-212-3p MIMAT0000269
ggccgtgactaaagactgtta

SEQ ID NO: 6386 - DNA, 22 bp, Artificial Sequence
  Synthetic oligonucleotide
  Mismatch hsa-miR-585-5p MIMAT0026618
tctgggcgtattcgtgtgctag

SEQ ID NO: 6387 - DNA, 19 bp, Artificial Sequence
  Synthetic oligonucleotide
  Mismatch hsa-miR-1224-5p MIMAT0005458
ccacctcctaagtcctcac

SEQ ID NO: 6388 - DNA, 22 bp, Artificial Sequence
  Synthetic oligonucleotide
  Mismatch hsa-miR-4772-5p MIMAT0019926
agtctgcaattccgcctgatca

SEQ ID NO: 6389 - DNA, 21 bp, Artificial Sequence
  Synthetic oligonucleotide
  Mismatch hsa-miR-6764-3p MIMAT0027429
ctgtcaaggattgaccagaga

SEQ ID NO: 6390 - DNA, 22 bp, Artificial Sequence
  Synthetic oligonucleotide
  Mismatch hsa-miR-3158-3p MIMAT0015032
gtcctgcagagtagaagccctt

SEQ ID NO: 6391 - DNA, 21 bp, Artificial Sequence
  Synthetic oligonucleotide
  Mismatch hsa-miR-4427 MIMAT0018942
actcttcagatcctattcaga

SEQ ID NO: 6392 - DNA, 22 bp, Artificial Sequence
  Synthetic oligonucleotide
  Mismatch hsa-miR-3913-5p MIMAT0018187
agacatcaagactagtcccaaa

SEQ ID NO: 6393 - DNA, 21 bp, Artificial Sequence
  Synthetic oligonucleotide
  Mismatch hsa-miR-553 MIMAT0003216
aaaacaaaattccaccgtttt

SEQ ID NO: 6394 - DNA, 22 bp, Artificial Sequence
  Synthetic oligonucleotide
  Mismatch hsa-miR-6740-3p MIMAT0027382
ctgtttgggagatgagaagaca

SEQ ID NO: 6395 - DNA, 20 bp, Artificial Sequence
  Synthetic oligonucleotide
  Mismatch hsa-miR-568 MIMAT0003232
gtgtgtatatttttatacat

SEQ ID NO: 6396 - DNA, 22 bp, Artificial Sequence
  Synthetic oligonucleotide
  Mismatch hsa-miR-3714 MIMAT0018165
acaggggagcatcgctgccttc

SEQ ID NO: 6397 - DNA, 22 bp, Artificial Sequence
  Synthetic oligonucleotide
  Mismatch hsa-miR-592 MIMAT0003260
acatcatcgcactttgacacaa

SEQ ID NO: 6398 - DNA, 22 bp, Artificial Sequence
  Synthetic oligonucleotide
  Mismatch hsa-miR-6741-5p MIMAT0027383
cacggctcccattagcacccac

SEQ ID NO: 6399 - DNA, 25 bp, Artificial Sequence
  Synthetic oligonucleotide
  Mismatch hsa-miR-3189-5p MIMAT0019217
tcctacccagggcattgatggggca

SEQ ID NO: 6400 - DNA, 22 bp, Artificial Sequence
  Synthetic oligonucleotide
  Mismatch hsa-miR-3616-5p MIMAT0017995
acatatcatgaacgcacttcat

SEQ ID NO: 6401 - DNA, 22 bp, Artificial Sequence
  Synthetic oligonucleotide
  Mismatch hsa-miR-6753-5p MIMAT0027406
tcagccctgcttcgccctggtg

SEQ ID NO: 6402 - DNA, 21 bp, Artificial Sequence
  Synthetic oligonucleotide
  Mismatch hsa-miR-940 MIMAT0004983
ggggagcgggaaccctgcctt

SEQ ID NO: 6403 - DNA, 22 bp, Artificial Sequence
  Synthetic oligonucleotide
  Mismatch hsa-miR-33b-3p MIMAT0004811
gggctgcactgttgaggcactg

SEQ ID NO: 6404 - DNA, 23 bp, Artificial Sequence
  Synthetic oligonucleotide
  Mismatch hsa-miR-4668-3p MIMAT0019746
ctggaaaaacaattaggattttc

SEQ ID NO: 6405 - DNA, 21 bp, Artificial Sequence
  Synthetic oligonucleotide
  Mismatch hsa-miR-588 MIMAT0003255
gttctaaccctctgtggccaa

SEQ ID NO: 6406 - DNA, 21 bp, Artificial Sequence
  Synthetic oligonucleotide
  Mismatch hsa-miR-1251-5p MIMAT0005903
agcgcctttgatagctagagt

SEQ ID NO: 6407 - DNA, 23 bp, Artificial Sequence
  Synthetic oligonucleotide
  Mismatch hsa-miR-8078 MIMAT0031005
gagtctctcaccaagcctagacc

SEQ ID NO: 6408 - DNA, 18 bp, Artificial Sequence
  Synthetic oligonucleotide
  Mismatch hsa-miR-5703 MIMAT0022496
accttcctaacttctcct

SEQ ID NO: 6409 - DNA, 22 bp, Artificial Sequence
  Synthetic oligonucleotide
  Mismatch hsa-miR-146a-3p MIMAT0004608
ctgaagaactgtttttcagagg

SEQ ID NO: 6410 - DNA, 25 bp, Artificial Sequence
  Synthetic oligonucleotide
  Mismatch hsa-miR-449c-5p MIMAT0010251
acagccgctagcaactcactgccta

SEQ ID NO: 6411 - DNA, 23 bp, Artificial Sequence
  Synthetic oligonucleotide
  Mismatch hsa-miR-5087 MIMAT0021079
catgccagcaaaattacaaaccc

SEQ ID NO: 6412 - DNA, 21 bp, Artificial Sequence
  Synthetic oligonucleotide
  Mismatch hsa-miR-6800-3p MIMAT0027501
ggggcgatgcttggagaggtg

SEQ ID NO: 6413 - DNA, 22 bp, Artificial Sequence
  Synthetic oligonucleotide
  Mismatch hsa-miR-3913-3p MIMAT0019225
tttgggactgactttgatgtct

SEQ ID NO: 6414 - DNA, 22 bp, Artificial Sequence
  Synthetic oligonucleotide
  Mismatch hsa-miR-6814-3p MIMAT0027529
ctgccaagggatagatgcgagt

SEQ ID NO: 6415 - DNA, 20 bp, Artificial Sequence
  Synthetic oligonucleotide
  Mismatch hsa-miR-1292-3p MIMAT0022948
gaacgggagttggggcgcga

SEQ ID NO: 6416 - DNA, 22 bp, Artificial Sequence
  Synthetic oligonucleotide
  Mismatch hsa-miR-6735-3p MIMAT0027372
ctgagggaggaatcacaggcct

SEQ ID NO: 6417 - DNA, 20 bp, Artificial Sequence
  Synthetic oligonucleotide
  Mismatch hsa-miR-548av-3p MIMAT0022304
gcaaaagtatttgcagtttt

SEQ ID NO: 6418 - DNA, 19 bp, Artificial Sequence
  Synthetic oligonucleotide
  Mismatch hsa-miR-5701 MIMAT0022494
aatcagaatatgacaataa

SEQ ID NO: 6419 - DNA, 22 bp, Artificial Sequence
  Synthetic oligonucleotide
  Mismatch hsa-miR-450b-3p MIMAT0004910
tatggatgcaatttgatcccaa

SEQ ID NO: 6420 - DNA, 21 bp, Artificial Sequence
  Synthetic oligonucleotide
  Mismatch hsa-miR-7847-3p MIMAT0030422
gcctcctccttatcctccacg

SEQ ID NO: 6421 - DNA, 17 bp, Artificial Sequence
  Synthetic oligonucleotide
  Mismatch hsa-miR-4497 MIMAT0019032
gcccagttgtcccggag

SEQ ID NO: 6422 - DNA, 23 bp, Artificial Sequence
  Synthetic oligonucleotide
  Mismatch hsa-miR-3187-5p MIMAT0019216
ccttcagccacatactgcccagg

SEQ ID NO: 6423 - DNA, 19 bp, Artificial Sequence
  Synthetic oligonucleotide
  Mismatch hsa-miR-6820-5p MIMAT0027540
tgaccccaattctgccgca

SEQ ID NO: 6424 - DNA, 21 bp, Artificial Sequence
  Synthetic oligonucleotide
  Mismatch hsa-miR-1181 MIMAT0005826
cggctcgggtaacggcgacgg

SEQ ID NO: 6425 - DNA, 22 bp, Artificial Sequence
  Synthetic oligonucleotide
  Mismatch hsa-miR-3121-3p MIMAT0014983
tgtcctttgccctctctattta

SEQ ID NO: 6426 - DNA, 22 bp, Artificial Sequence
  Synthetic oligonucleotide
  Mismatch hsa-miR-8058 MIMAT0030985
ttatggcaagactaaagtccag

SEQ ID NO: 6427 - DNA, 22 bp, Artificial Sequence
  Synthetic oligonucleotide
  Mismatch hsa-miR-452-5p MIMAT0001635
tcagtttcctccacaaacagtt

SEQ ID NO: 6428 - DNA, 22 bp, Artificial Sequence
  Synthetic oligonucleotide
  Mismatch hsa-miR-642a-5p MIMAT0003312
caagacacattcagagagggac

SEQ ID NO: 6429 - DNA, 21 bp, Artificial Sequence
  Synthetic oligonucleotide
  Mismatch hsa-miR-1204 MIMAT0005868
ataatggagattaggccacga

SEQ ID NO: 6430 - DNA, 22 bp, Artificial Sequence
  Synthetic oligonucleotide
  Mismatch hsa-miR-6753-3p MIMAT0027407
gtgccagggcaatgacagacca

SEQ ID NO: 6431 - DNA, 22 bp, Artificial Sequence
  Synthetic oligonucleotide
  Mismatch hsa-miR-3156-5p MIMAT0015030
tgtctcccactctcagatcttt

SEQ ID NO: 6432 - DNA, 22 bp, Artificial Sequence
  Synthetic oligonucleotide
  Mismatch hsa-miR-363-5p MIMAT0003385
aaattgcatcgcaatccacccg

SEQ ID NO: 6433 - DNA, 22 bp, Artificial Sequence
  Synthetic oligonucleotide
  Mismatch hsa-miR-7851-3p MIMAT0030426
tccaacctcagcttcccaggta

SEQ ID NO: 6434 - DNA, 22 bp, Artificial Sequence
  Synthetic oligonucleotide
  Mismatch hsa-miR-3152-3p MIMAT0015025
ttattgccccttctctaacaca

SEQ ID NO: 6435 - DNA, 21 bp, Artificial Sequence
  Synthetic oligonucleotide
  Mismatch hsa-miR-520e MIMAT0002825
ccctcaaaaaaaaagcacttt

SEQ ID NO: 6436 - DNA, 21 bp, Artificial Sequence
  Synthetic oligonucleotide
  Mismatch hsa-miR-607 MIMAT0003275
gttatagatccagatttgaac

SEQ ID NO: 6437 - DNA, 22 bp, Artificial Sequence
  Synthetic oligonucleotide
  Mismatch hsa-miR-6783-5p MIMAT0027466
ccggatcaggatctttccccta

SEQ ID NO: 6438 - DNA, 22 bp, Artificial Sequence
  Synthetic oligonucleotide
  Mismatch hsa-miR-520c-5p MIMAT0005455
cagaaagtgctctcctctagag

SEQ ID NO: 6439 - DNA, 21 bp, Artificial Sequence
  Synthetic oligonucleotide
  Mismatch hsa-miR-4766-5p MIMAT0019917
aacaccaactattctttcaga

SEQ ID NO: 6440 - DNA, 22 bp, Artificial Sequence
  Synthetic oligonucleotide
  Mismatch hsa-miR-580-3p MIMAT0003245
cctaatgattctccattctcaa

SEQ ID NO: 6441 - DNA, 22 bp, Artificial Sequence
  Synthetic oligonucleotide
  Mismatch hsa-miR-4716-3p MIMAT0019827
tctccatgtttttttccccctt

SEQ ID NO: 6442 - DNA, 22 bp, Artificial Sequence
  Synthetic oligonucleotide
  Mismatch hsa-miR-6881-5p MIMAT0027662
tgaccctcctactcttacccca

SEQ ID NO: 6443 - DNA, 21 bp, Artificial Sequence
  Synthetic oligonucleotide
  Mismatch hsa-miR-25-5p MIMAT0004498
caattgcccatatctccgcct

SEQ ID NO: 6444 - DNA, 17 bp, Artificial Sequence
  Synthetic oligonucleotide
  Mismatch hsa-miR-3178 MIMAT0015055
cgatccaaccgcgcccc

SEQ ID NO: 6445 - DNA, 22 bp, Artificial Sequence
  Synthetic oligonucleotide
  Mismatch hsa-miR-548b-3p MIMAT0003254
acaaaagcaaccaaggttcttg

SEQ ID NO: 6446 - DNA, 20 bp, Artificial Sequence
  Synthetic oligonucleotide
  Mismatch hsa-miR-4651 MIMAT0019715
gcccgacctttcccaccccg

SEQ ID NO: 6447 - DNA, 22 bp, Artificial Sequence
  Synthetic oligonucleotide
  Mismatch hsa-miR-4798-5p MIMAT0019974
ccaattcacaatatataccgaa

SEQ ID NO: 6448 - DNA, 22 bp, Artificial Sequence
  Synthetic oligonucleotide
  Mismatch hsa-miR-148a-5p MIMAT0004549
agtcggagtgttccagaacttt

SEQ ID NO: 6449 - DNA, 22 bp, Artificial Sequence
  Synthetic oligonucleotide
  Mismatch hsa-miR-4781-3p MIMAT0019943
ctctagcgaggtctccaacatt

SEQ ID NO: 6450 - DNA, 22 bp, Artificial Sequence
  Synthetic oligonucleotide
  Mismatch hsa-miR-4538 MIMAT0019081
tcagcccagcttttccaagctc

SEQ ID NO: 6451 - DNA, 22 bp, Artificial Sequence
  Synthetic oligonucleotide
  Mismatch hsa-miR-6722-3p MIMAT0025854
cctggcccacctaacccctgca

SEQ ID NO: 6452 - DNA, 22 bp, Artificial Sequence
  Synthetic oligonucleotide
  Mismatch hsa-miR-4716-5p MIMAT0019826
agaagggggaaaaaaacatgga

SEQ ID NO: 6453 - DNA, 23 bp, Artificial Sequence
  Synthetic oligonucleotide
  Mismatch hsa-miR-3973 MIMAT0019358
ctaaggctaatgtcgtactttgt

SEQ ID NO: 6454 - DNA, 22 bp, Artificial Sequence
  Synthetic oligonucleotide
  Mismatch hsa-miR-99b-5p MIMAT0000689
cgcaaggtcggccctacgggtg

SEQ ID NO: 6455 - DNA, 21 bp, Artificial Sequence
  Synthetic oligonucleotide
  Mismatch hsa-miR-548au-5p MIMAT0022291
gcaaaaaccgttattactttt

SEQ ID NO: 6456 - DNA, 22 bp, Artificial Sequence
  Synthetic oligonucleotide
  Mismatch hsa-miR-494-3p MIMAT0002816
gaggtttcccgcatatgtttca

SEQ ID NO: 6457 - DNA, 22 bp, Artificial Sequence
  Synthetic oligonucleotide
  Mismatch hsa-miR-452-3p MIMAT0001636
cacttacttctccgcagatgag

SEQ ID NO: 6458 - DNA, 22 bp, Artificial Sequence
  Synthetic oligonucleotide
  Mismatch hsa-miR-19b-2-5p MIMAT0004492
tgaaatgcaaatttgcaaaact

SEQ ID NO: 6459 - DNA, 22 bp, Artificial Sequence
  Synthetic oligonucleotide
  Mismatch hsa-miR-221-5p MIMAT0004568
aaatctacattacatgccaggt

SEQ ID NO: 6460 - DNA, 21 bp, Artificial Sequence
  Synthetic oligonucleotide
  Mismatch hsa-miR-4322 MIMAT0016873
ccccacgcgccaagcccacag

SEQ ID NO: 6461 - DNA, 21 bp, Artificial Sequence
  Synthetic oligonucleotide
  Mismatch hsa-miR-6780a-3p MIMAT0027461
ctaggaaagattacagaggag

SEQ ID NO: 6462 - DNA, 19 bp, Artificial Sequence
  Synthetic oligonucleotide
  Mismatch hsa-miR-4329 MIMAT0016923
gtggaacttaggtctcagg

SEQ ID NO: 6463 - DNA, 21 bp, Artificial Sequence
  Synthetic oligonucleotide
  Mismatch hsa-miR-548at-3p MIMAT0022278
acaaaagttatcgcggttttg

SEQ ID NO: 6464 - DNA, 22 bp, Artificial Sequence
  Synthetic oligonucleotide
  Mismatch hsa-miR-4704-3p MIMAT0019804
tagacactagacttgtgactga

SEQ ID NO: 6465 - DNA, 22 bp, Artificial Sequence
  Synthetic oligonucleotide
  Mismatch hsa-miR-3664-3p MIMAT0019220
aactctgtcttctctcctgaga

SEQ ID NO: 6466 - DNA, 20 bp, Artificial Sequence
  Synthetic oligonucleotide
  Mismatch hsa-miR-4648 MIMAT0019710
ctcccatttatagtcccaca

SEQ ID NO: 6467 - DNA, 22 bp, Artificial Sequence
  Synthetic oligonucleotide
  Mismatch hsa-let-7f-2-3p MIMAT0004487
ggaaagacagttaactgtatag

SEQ ID NO: 6468 - DNA, 21 bp, Artificial Sequence
  Synthetic oligonucleotide
  Mismatch hsa-miR-551a MIMAT0003214
tggaaaccaaatgtgggtcgc

SEQ ID NO: 6469 - DNA, 22 bp, Artificial Sequence
  Synthetic oligonucleotide
  Mismatch hsa-miR-4749-5p MIMAT0019885
gatgccctggctcgtccccgca

SEQ ID NO: 6470 - DNA, 22 bp, Artificial Sequence
  Synthetic oligonucleotide
  Mismatch hsa-miR-7844-5p MIMAT0030419
tacaccacacaaccctagtttt

SEQ ID NO: 6471 - DNA, 22 bp, Artificial Sequence
  Synthetic oligonucleotide
  Mismatch hsa-miR-3167 MIMAT0015042
acaccagtattcttgaaatcct

SEQ ID NO: 6472 - DNA, 21 bp, Artificial Sequence
  Synthetic oligonucleotide
  Mismatch hsa-miR-1295b-5p MIMAT0022293
attaggccgctaatctgggtg

SEQ ID NO: 6473 - DNA, 22 bp, Artificial Sequence
  Synthetic oligonucleotide
  Mismatch hsa-miR-891a-3p MIMAT0026717
ctcacaacaaatttgtgccact

SEQ ID NO: 6474 - DNA, 21 bp, Artificial Sequence
  Synthetic oligonucleotide
  Mismatch hsa-miR-215-5p MIMAT0000272
gtctgtcaatctataggtcat

SEQ ID NO: 6475 - DNA, 25 bp, Artificial Sequence
  Synthetic oligonucleotide
  Mismatch hsa-miR-1292-5p MIMAT0005943
cagcgtctgccggattccgttccca

SEQ ID NO: 6476 - DNA, 22 bp, Artificial Sequence
  Synthetic oligonucleotide
  Mismatch hsa-miR-4670-3p MIMAT0019751
aagcgaccatgtcgtaacttca

SEQ ID NO: 6477 - DNA, 23 bp, Artificial Sequence
  Synthetic oligonucleotide
  Mismatch hsa-miR-605-5p MIMAT0003273
aggagaaggcactttgggattta

SEQ ID NO: 6478 - DNA, 22 bp, Artificial Sequence
  Synthetic oligonucleotide
  Mismatch hsa-miR-6806-3p MIMAT0027513
ctgcaggaatgctagagcttca

SEQ ID NO: 6479 - DNA, 22 bp, Artificial Sequence
  Synthetic oligonucleotide
  Mismatch hsa-miR-4720-5p MIMAT0019833
aagttataccatttatgccagg

SEQ ID NO: 6480 - DNA, 20 bp, Artificial Sequence
  Synthetic oligonucleotide
  Mismatch hsa-miR-6758-3p MIMAT0027417
ctggacagaaaagaatgagt

SEQ ID NO: 6481 - DNA, 20 bp, Artificial Sequence
  Synthetic oligonucleotide
  Mismatch hsa-miR-5684 MIMAT0022473
ctgttgctctagctagagtt

SEQ ID NO: 6482 - DNA, 22 bp, Artificial Sequence
  Synthetic oligonucleotide
  Mismatch hsa-miR-150-5p MIMAT0000451
cactggtacaaaagttgggaga

SEQ ID NO: 6483 - DNA, 23 bp, Artificial Sequence
  Synthetic oligonucleotide
  Mismatch hsa-miR-361-3p MIMAT0004682
aaatcagaatcattcctggggga

SEQ ID NO: 6484 - DNA, 19 bp, Artificial Sequence
  Synthetic oligonucleotide
  Mismatch hsa-miR-6133 MIMAT0024617
tacccaactccctccctca

SEQ ID NO: 6485 - DNA, 22 bp, Artificial Sequence
  Synthetic oligonucleotide
  Mismatch hsa-miR-4446-3p MIMAT0018965
acccatgtcaccaccagccctg

SEQ ID NO: 6486 - DNA, 18 bp, Artificial Sequence
  Synthetic oligonucleotide
  Mismatch hsa-miR-4281 MIMAT0016907
cccccctttccgggaccc

SEQ ID NO: 6487 - DNA, 22 bp, Artificial Sequence
  Synthetic oligonucleotide
  Mismatch hsa-miR-628-5p MIMAT0004809
cctctagtaaacttgtcagcat

SEQ ID NO: 6488 - DNA, 22 bp, Artificial Sequence
  Synthetic oligonucleotide
  Mismatch hsa-miR-100-3p MIMAT0004512
catacctatagtcacaagcttg

SEQ ID NO: 6489 - DNA, 22 bp, Artificial Sequence
  Synthetic oligonucleotide
  Mismatch hsa-miR-3133 MIMAT0014998
attgggttttataagttcttta

SEQ ID NO: 6490 - DNA, 22 bp, Artificial Sequence
  Synthetic oligonucleotide
  Mismatch hsa-miR-4298 MIMAT0016852
ctgcctcctccctctgtcccag

SEQ ID NO: 6491 - DNA, 20 bp, Artificial Sequence
  Synthetic oligonucleotide
  Mismatch hsa-miR-6777-3p MIMAT0027455
ctgggggcctagagagtgga

SEQ ID NO: 6492 - DNA, 22 bp, Artificial Sequence
  Synthetic oligonucleotide
  Mismatch hsa-miR-6759-5p MIMAT0027418
acagacttctgttcacccacaa

SEQ ID NO: 6493 - DNA, 22 bp, Artificial Sequence
  Synthetic oligonucleotide
  Mismatch hsa-miR-323a-5p MIMAT0004696
gcgaacgcgccttggaccacct

SEQ ID NO: 6494 - DNA, 22 bp, Artificial Sequence
  Synthetic oligonucleotide
  Mismatch hsa-miR-345-5p MIMAT0000772
gagccctggacctggagtcagc

SEQ ID NO: 6495 - DNA, 20 bp, Artificial Sequence
  Synthetic oligonucleotide
  Mismatch hsa-miR-877-5p MIMAT0004949
ccctgcgcctcctcctctac

SEQ ID NO: 6496 - DNA, 22 bp, Artificial Sequence
  Synthetic oligonucleotide
  Mismatch hsa-miR-5008-5p MIMAT0021039
ccactgtgcccttagggcctca

SEQ ID NO: 6497 - DNA, 22 bp, Artificial Sequence
  Synthetic oligonucleotide
  Mismatch hsa-miR-27b-5p MIMAT0004588
gttcaccaatctactaagctct

SEQ ID NO: 6498 - DNA, 23 bp, Artificial Sequence
  Synthetic oligonucleotide
  Mismatch hsa-miR-301b-3p MIMAT0004958
gctttgacaatactattgcactg

SEQ ID NO: 6499 - DNA, 22 bp, Artificial Sequence
  Synthetic oligonucleotide
  Mismatch hsa-miR-5000-3p MIMAT0021020
tccaagttcagttgtgtcctga

SEQ ID NO: 6500 - DNA, 22 bp, Artificial Sequence
  Synthetic oligonucleotide
  Mismatch hsa-miR-4776-5p MIMAT0019932
agcccttgccactctggtccac

SEQ ID NO: 6501 - DNA, 20 bp, Artificial Sequence
  Synthetic oligonucleotide
  Mismatch hsa-miR-1227-3p MIMAT0005580
ctggggaaataggtggcacg

SEQ ID NO: 6502 - DNA, 22 bp, Artificial Sequence
  Synthetic oligonucleotide
  Mismatch hsa-miR-659-3p MIMAT0003337
tggggaccctctttgaaccaag

SEQ ID NO: 6503 - DNA, 22 bp, Artificial Sequence
  Synthetic oligonucleotide
  Mismatch hsa-miR-92a-2-5p MIMAT0004508
gtaatgcaacatttccccaccc

SEQ ID NO: 6504 - DNA, 23 bp, Artificial Sequence
  Synthetic oligonucleotide
  Mismatch hsa-miR-6813-5p MIMAT0027526
agaacctgaaacttcagcccctg

SEQ ID NO: 6505 - DNA, 22 bp, Artificial Sequence
  Synthetic oligonucleotide
  Mismatch hsa-miR-1256 MIMAT0005907
agctagtgagatatcaatgcct

SEQ ID NO: 6506 - DNA, 23 bp, Artificial Sequence
  Synthetic oligonucleotide
  Mismatch hsa-miR-105-5p MIMAT0000102
accacaggagtccaagcatttga

SEQ ID NO: 6507 - DNA, 22 bp, Artificial Sequence
  Synthetic oligonucleotide
  Mismatch hsa-miR-4755-3p MIMAT0019896
actttcccttctaagcctggct

SEQ ID NO: 6508 - DNA, 21 bp, Artificial Sequence
  Synthetic oligonucleotide
  Mismatch hsa-miR-640 MIMAT0003310
agaggcaggtctctggatcat

SEQ ID NO: 6509 - DNA, 22 bp, Artificial Sequence
  Synthetic oligonucleotide
  Mismatch hsa-miR-199a-3p MIMAT0000232
taaccaatgtgttgactactgt

SEQ ID NO: 6510 - DNA, 21 bp, Artificial Sequence
  Synthetic oligonucleotide
  Mismatch hsa-miR-1224-3p MIMAT0005459
ctgaggagagtagaggtgggg

SEQ ID NO: 6511 - DNA, 22 bp, Artificial Sequence
  Synthetic oligonucleotide
  Mismatch hsa-miR-30d-3p MIMAT0004551
gcagcaaacattcgactgaaag

SEQ ID NO: 6512 - DNA, 21 bp, Artificial Sequence
  Synthetic oligonucleotide
  Mismatch hsa-miR-1307-5p MIMAT0022727
agccggtcgaaatccggtcga

SEQ ID NO: 6513 - DNA, 22 bp, Artificial Sequence
  Synthetic oligonucleotide
  Mismatch hsa-miR-32-3p MIMAT0004505
aaatatcacacttactaaattg

SEQ ID NO: 6514 - DNA, 17 bp, Artificial Sequence
  Synthetic oligonucleotide
  Mismatch hsa-miR-4500 MIMAT0019036
aagaaatcactacctca

SEQ ID NO: 6515 - DNA, 18 bp, Artificial Sequence
  Synthetic oligonucleotide
  Mismatch hsa-miR-4273 MIMAT0016903
ctgtccactagagaacac

SEQ ID NO: 6516 - DNA, 22 bp, Artificial Sequence
  Synthetic oligonucleotide
  Mismatch hsa-miR-525-3p MIMAT0002839
cgctctaaaggatagcgccttc

SEQ ID NO: 6517 - DNA, 23 bp, Artificial Sequence
  Synthetic oligonucleotide
  Mismatch hsa-miR-708-5p MIMAT0004926
cccagctagattacaagctcctt

SEQ ID NO: 6518 - DNA, 21 bp, Artificial Sequence
  Synthetic oligonucleotide
  Mismatch hsa-miR-488-3p MIMAT0004763
gaccaagaaactgcctttcaa

SEQ ID NO: 6519 - DNA, 18 bp, Artificial Sequence
  Synthetic oligonucleotide
  Mismatch hsa-miR-4466 MIMAT0018993
ccccgccaacccgcaccc

SEQ ID NO: 6520 - DNA, 22 bp, Artificial Sequence
  Synthetic oligonucleotide
  Mismatch hsa-miR-2467-3p MIMAT0019953
cctgagcctcttcgcctctgct

SEQ ID NO: 6521 - DNA, 22 bp, Artificial Sequence
  Synthetic oligonucleotide
  Mismatch hsa-miR-6764-5p MIMAT0027428
caactctgacctaaccctggga

SEQ ID NO: 6522 - DNA, 23 bp, Artificial Sequence
  Synthetic oligonucleotide
  Mismatch hsa-miR-3928-5p MIMAT0027037
gcaggcggaaccccagagcttca

SEQ ID NO: 6523 - DNA, 22 bp, Artificial Sequence
  Synthetic oligonucleotide
  Mismatch hsa-miR-548y MIMAT0018354
ggcaaaaacagcaattactttt

SEQ ID NO: 6524 - DNA, 22 bp, Artificial Sequence
  Synthetic oligonucleotide
  Mismatch hsa-miR-3914 MIMAT0018188
acttctcatttcttggttcctt

SEQ ID NO: 6525 - DNA, 22 bp, Artificial Sequence
  Synthetic oligonucleotide
  Mismatch hsa-miR-34a-5p MIMAT0000255
acaaccagctataacactgcca

SEQ ID NO: 6526 - DNA, 23 bp, Artificial Sequence
  Synthetic oligonucleotide
  Mismatch hsa-miR-335-5p MIMAT0000765
acatttttcgtttctgctcttga

SEQ ID NO: 6527 - DNA, 22 bp, Artificial Sequence
  Synthetic oligonucleotide
  Mismatch hsa-miR-711 MIMAT0012734
cttacgtctctttctgggtccc

SEQ ID NO: 6528 - DNA, 19 bp, Artificial Sequence
  Synthetic oligonucleotide
  Mismatch hsa-miR-5588-3p MIMAT0022296
gctggcatctgtgggactt

SEQ ID NO: 6529 - DNA, 19 bp, Artificial Sequence
  Synthetic oligonucleotide
  Mismatch hsa-miR-6848-3p MIMAT0027597
ctgggggcttagagaccac

SEQ ID NO: 6530 - DNA, 21 bp, Artificial Sequence
  Synthetic oligonucleotide
  Mismatch hsa-miR-6769a-5p MIMAT0027438
agggctcctctttacccacct

SEQ ID NO: 6531 - DNA, 23 bp, Artificial Sequence
  Synthetic oligonucleotide
  Mismatch hsa-miR-5091 MIMAT0021083
cagcacagtcttaccgtctccgt

SEQ ID NO: 6532 - DNA, 22 bp, Artificial Sequence
  Synthetic oligonucleotide
  Mismatch hsa-miR-26a-5p MIMAT0000082
agcctatcctgatttacttgaa

SEQ ID NO: 6533 - DNA, 22 bp, Artificial Sequence
  Synthetic oligonucleotide
  Mismatch hsa-miR-99b-3p MIMAT0004678
cggacccacagttacgagcttg

SEQ ID NO: 6534 - DNA, 24 bp, Artificial Sequence
  Synthetic oligonucleotide
  Mismatch hsa-miR-4793-5p MIMAT0019965
cctctgccctgtgatgcaggatgt

SEQ ID NO: 6535 - DNA, 22 bp, Artificial Sequence
  Synthetic oligonucleotide
  Mismatch hsa-miR-6819-5p MIMAT0027538
gctccttggcctcccaccccaa

SEQ ID NO: 6536 - DNA, 21 bp, Artificial Sequence
  Synthetic oligonucleotide
  Mismatch hsa-miR-6747-3p MIMAT0027395
ctggtgcagaaaaaggcagga

SEQ ID NO: 6537 - DNA, 22 bp, Artificial Sequence
  Synthetic oligonucleotide
  Mismatch hsa-miR-190a-5p MIMAT0000458
acctaatatatttaacatatca

SEQ ID NO: 6538 - DNA, 21 bp, Artificial Sequence
  Synthetic oligonucleotide
  Mismatch hsa-miR-7109-5p MIMAT0028115
agcagggtcttttccccccag

SEQ ID NO: 6539 - DNA, 21 bp, Artificial Sequence
  Synthetic oligonucleotide
  Mismatch hsa-miR-6728-3p MIMAT0027358
ctggggagagttgagcagaga

SEQ ID NO: 6540 - DNA, 23 bp, Artificial Sequence
  Synthetic oligonucleotide
  Mismatch hsa-miR-4647 MIMAT0019709
ttcctcagcacaataccatcttc

SEQ ID NO: 6541 - DNA, 22 bp, Artificial Sequence
  Synthetic oligonucleotide
  Mismatch hsa-miR-3674 MIMAT0018097
ggccaatcttaaattctacaat

SEQ ID NO: 6542 - DNA, 22 bp, Artificial Sequence
  Synthetic oligonucleotide
  Mismatch hsa-miR-3165 MIMAT0015039
tgaggtcacatcacatccacct

SEQ ID NO: 6543 - DNA, 22 bp, Artificial Sequence
  Synthetic oligonucleotide
  Mismatch hsa-miR-548c-3p MIMAT0003285
gcaaaagtaatcaagatttttg

SEQ ID NO: 6544 - DNA, 18 bp, Artificial Sequence
  Synthetic oligonucleotide
  Mismatch hsa-miR-4308 MIMAT0016861
aagaagattctccaggga

SEQ ID NO: 6545 - DNA, 22 bp, Artificial Sequence
  Synthetic oligonucleotide
  Mismatch hsa-miR-6731-5p MIMAT0027363
tccacaatacctcgctctccca

SEQ ID NO: 6546 - DNA, 21 bp, Artificial Sequence
  Synthetic oligonucleotide
  Mismatch hsa-miR-3130-3p MIMAT0014994
ttacccagtcctcggtgcagc

SEQ ID NO: 6547 - DNA, 21 bp, Artificial Sequence
  Synthetic oligonucleotide
  Mismatch hsa-miR-3666 MIMAT0018088
tcggcatctattcttgcactg

SEQ ID NO: 6548 - DNA, 22 bp, Artificial Sequence
  Synthetic oligonucleotide
  Mismatch hsa-miR-4639-5p MIMAT0019697
tcaatctcagctcacttagcaa

SEQ ID NO: 6549 - DNA, 21 bp, Artificial Sequence
  Synthetic oligonucleotide
  Mismatch hsa-miR-297 MIMAT0004450
catgcacatgttcacatacat

SEQ ID NO: 6550 - DNA, 23 bp, Artificial Sequence
  Synthetic oligonucleotide
  Mismatch hsa-miR-1264 MIMAT0005791
aacaggtgctcatttaagacttg

SEQ ID NO: 6551 - DNA, 22 bp, Artificial Sequence
  Synthetic oligonucleotide
  Mismatch hsa-miR-5583-3p MIMAT0022282
ccaaactaatactcccatattc

SEQ ID NO: 6552 - DNA, 23 bp, Artificial Sequence
  Synthetic oligonucleotide
  Mismatch hsa-miR-3188 MIMAT0015070
ccccgtatccgcttaaagcctct

SEQ ID NO: 6553 - DNA, 22 bp, Artificial Sequence
  Synthetic oligonucleotide
  Mismatch hsa-let-7a-5p MIMAT0000062
aactatacaactcactacctca

SEQ ID NO: 6554 - DNA, 19 bp, Artificial Sequence
  Synthetic oligonucleotide
  Mismatch hsa-miR-6080 MIMAT0023705
cgggaacgttcgcactaga

SEQ ID NO: 6555 - DNA, 23 bp, Artificial Sequence
  Synthetic oligonucleotide
  Mismatch hsa-miR-7-5p MIMAT0000252
acaacaaaatcatcagtcttcca

SEQ ID NO: 6556 - DNA, 23 bp, Artificial Sequence
  Synthetic oligonucleotide
  Mismatch hsa-miR-3136-5p MIMAT0015003
aatgaccctaccctttcagtcag

SEQ ID NO: 6557 - DNA, 22 bp, Artificial Sequence
  Synthetic oligonucleotide
  Mismatch hsa-miR-499a-3p MIMAT0004772
agcacagacttattgtgatgtt

SEQ ID NO: 6558 - DNA, 22 bp, Artificial Sequence
  Synthetic oligonucleotide
  Mismatch hsa-miR-629-3p MIMAT0003298
gctgggcttacactgggagaac

SEQ ID NO: 6559 - DNA, 21 bp, Artificial Sequence
  Synthetic oligonucleotide
  Mismatch hsa-miR-4771 MIMAT0019925
taattgtaggctaagtctgct

SEQ ID NO: 6560 - DNA, 21 bp, Artificial Sequence
  Synthetic oligonucleotide
  Mismatch hsa-miR-518d-3p MIMAT0002864
gctccaaaggatagcgctttg

SEQ ID NO: 6561 - DNA, 23 bp, Artificial Sequence
  Synthetic oligonucleotide
  Mismatch hsa-miR-6815-5p MIMAT0027530
aatgactcctccaacgccaccta

SEQ ID NO: 6562 - DNA, 22 bp, Artificial Sequence
  Synthetic oligonucleotide
  Mismatch hsa-miR-6746-5p MIMAT0027392
ccaggccacctttttctcccgg

SEQ ID NO: 6563 - DNA, 23 bp, Artificial Sequence
  Synthetic oligonucleotide
  Mismatch hsa-miR-6772-3p MIMAT0027445
tgtgggcacagaaccaggagcaa

SEQ ID NO: 6564 - DNA, 22 bp, Artificial Sequence
  Synthetic oligonucleotide
  Mismatch hsa-miR-130a-5p MIMAT0004593
gcagacagtagttcaatgtgaa

SEQ ID NO: 6565 - DNA, 23 bp, Artificial Sequence
  Synthetic oligonucleotide
  Mismatch hsa-miR-137 MIMAT0000429
ctacgcgtattcccaagcaataa

SEQ ID NO: 6566 - DNA, 22 bp, Artificial Sequence
  Synthetic oligonucleotide
  Mismatch hsa-miR-874-3p MIMAT0004911
tcggtccctcgaaccagggcag

SEQ ID NO: 6567 - DNA, 21 bp, Artificial Sequence
  Synthetic oligonucleotide
  Mismatch hsa-miR-331-3p MIMAT0000760
ttctaggataaacccaggggc

SEQ ID NO: 6568 - DNA, 22 bp, Artificial Sequence
  Synthetic oligonucleotide
  Mismatch hsa-miR-187-3p MIMAT0000262
ccggctgcaacttaagacacga

SEQ ID NO: 6569 - DNA, 22 bp, Artificial Sequence
  Synthetic oligonucleotide
  Mismatch hsa-miR-3150a-3p MIMAT0015023
ccaacctcgagattctccccag

SEQ ID NO: 6570 - DNA, 21 bp, Artificial Sequence
  Synthetic oligonucleotide
  Mismatch hsa-miR-4433b-3p MIMAT0030414
acgtcccaccttccactcctg

SEQ ID NO: 6571 - DNA, 20 bp, Artificial Sequence
  Synthetic oligonucleotide
  Mismatch hsa-miR-924 MIMAT0004974
gcaagacatttcaagactct

SEQ ID NO: 6572 - DNA, 23 bp, Artificial Sequence
  Synthetic oligonucleotide
  Mismatch hsa-miR-523-3p MIMAT0002840
accctctataggatagcgcgttc

SEQ ID NO: 6573 - DNA, 21 bp, Artificial Sequence
  Synthetic oligonucleotide
  Mismatch hsa-miR-577 MIMAT0003242
caggtaccaactttttatcta

SEQ ID NO: 6574 - DNA, 23 bp, Artificial Sequence
  Synthetic oligonucleotide
  Mismatch hsa-miR-579-3p MIMAT0003244
aatcgcggtttactccaaatgaa

SEQ ID NO: 6575 - DNA, 22 bp, Artificial Sequence
  Synthetic oligonucleotide
  Mismatch hsa-miR-382-5p MIMAT0000737
cgaatccaccataaacaacttc

SEQ ID NO: 6576 - DNA, 18 bp, Artificial Sequence
  Synthetic oligonucleotide
  Mismatch hsa-miR-4770 MIMAT0019924
agctacaacgtcatctca

SEQ ID NO: 6577 - DNA, 21 bp, Artificial Sequence
  Synthetic oligonucleotide
  Mismatch hsa-miR-8083 MIMAT0031010
agttgcagccaccaagtcctg

SEQ ID NO: 6578 - DNA, 22 bp, Artificial Sequence
  Synthetic oligonucleotide
  Mismatch hsa-miR-218-1-3p MIMAT0004565
ccatggtgcttatcggaaccat

SEQ ID NO: 6579 - DNA, 21 bp, Artificial Sequence
  Synthetic oligonucleotide
  Mismatch hsa-miR-6877-3p MIMAT0027655
ggaggccaagaacagaggctg

SEQ ID NO: 6580 - DNA, 20 bp, Artificial Sequence
  Synthetic oligonucleotide
  Mismatch hsa-miR-3115 MIMAT0014977
accaactagctaacccatat

SEQ ID NO: 6581 - DNA, 23 bp, Artificial Sequence
  Synthetic oligonucleotide
  Mismatch hsa-miR-4746-5p MIMAT0019880
tctgcaggttcttttgggaccgg

SEQ ID NO: 6582 - DNA, 22 bp, Artificial Sequence
  Synthetic oligonucleotide
  Mismatch hsa-miR-5010-3p MIMAT0021044
ctggggaatggatgacacaaaa

SEQ ID NO: 6583 - DNA, 22 bp, Artificial Sequence
  Synthetic oligonucleotide
  Mismatch hsa-miR-376a-5p MIMAT0003386
tactcatagaaaaagaatctac

SEQ ID NO: 6584 - DNA, 21 bp, Artificial Sequence
  Synthetic oligonucleotide
  Mismatch hsa-miR-188-5p MIMAT0000457
ccctccaccacacaagggatg

SEQ ID NO: 6585 - DNA, 21 bp, Artificial Sequence
  Synthetic oligonucleotide
  Mismatch hsa-miR-7978 MIMAT0031181
tgagcaacgccttacaccaga

SEQ ID NO: 6586 - DNA, 20 bp, Artificial Sequence
  Synthetic oligonucleotide
  Mismatch hsa-miR-4507 MIMAT0019044
cccagcccaatccaacccag

SEQ ID NO: 6587 - DNA, 22 bp, Artificial Sequence
  Synthetic oligonucleotide
  Mismatch hsa-miR-495-3p MIMAT0002817
aagaagtgcactttgtttgttt

SEQ ID NO: 6588 - DNA, 17 bp, Artificial Sequence
  Synthetic oligonucleotide
  Mismatch hsa-miR-4293 MIMAT0016848
ctgttctcgtcaggctg

SEQ ID NO: 6589 - DNA, 17 bp, Artificial Sequence
  Synthetic oligonucleotide
  Mismatch hsa-miR-4516 MIMAT0019053
gccccgttccttctccc

SEQ ID NO: 6590 - DNA, 22 bp, Artificial Sequence
  Synthetic oligonucleotide
  Mismatch hsa-miR-4475 MIMAT0019002
ataatgaatgcccggtcccttg

SEQ ID NO: 6591 - DNA, 20 bp, Artificial Sequence
  Synthetic oligonucleotide
  Mismatch hsa-miR-1910-3p MIMAT0026917
tgtcatcctatttctgcctc

SEQ ID NO: 6592 - DNA, 22 bp, Artificial Sequence
  Synthetic oligonucleotide
  Mismatch hsa-miR-4681 MIMAT0019766
agatacagcctatattcccgtt

SEQ ID NO: 6593 - DNA, 23 bp, Artificial Sequence
  Synthetic oligonucleotide
  Mismatch hsa-miR-152-5p MIMAT0026479
agtcggagtgtactacagaacct

SEQ ID NO: 6594 - DNA, 22 bp, Artificial Sequence
  Synthetic oligonucleotide
  Mismatch hsa-miR-409-3p MIMAT0001639
aggggttcaccatgcaacattc

SEQ ID NO: 6595 - DNA, 22 bp, Artificial Sequence
  Synthetic oligonucleotide
  Mismatch hsa-miR-204-5p MIMAT0000265
aggcataggatatcaaagggaa

SEQ ID NO: 6596 - DNA, 22 bp, Artificial Sequence
  Synthetic oligonucleotide
  Mismatch hsa-miR-1249-3p MIMAT0005901
tgaagaaggggaagaagggcgt

SEQ ID NO: 6597 - DNA, 24 bp, Artificial Sequence
  Synthetic oligonucleotide
  Mismatch hsa-miR-4787-3p MIMAT0019957
gcgcggggcagtgaacggcgcatc

SEQ ID NO: 6598 - DNA, 19 bp, Artificial Sequence
  Synthetic oligonucleotide
  Mismatch hsa-miR-6071 MIMAT0023696
gccttggctagcagcagaa

SEQ ID NO: 6599 - DNA, 22 bp, Artificial Sequence
  Synthetic oligonucleotide
  Mismatch hsa-miR-3920 MIMAT0018195
tcagagagttataataatcagt

SEQ ID NO: 6600 - DNA, 22 bp, Artificial Sequence
  Synthetic oligonucleotide
  Mismatch hsa-miR-6879-5p MIMAT0027658
ctctcccacctctcctgccctg

SEQ ID NO: 6601 - DNA, 21 bp, Artificial Sequence
  Synthetic oligonucleotide
  Mismatch hsa-miR-548az-3p MIMAT0025457
gcaaaagtgaccgcagttttt

SEQ ID NO: 6602 - DNA, 21 bp, Artificial Sequence
  Synthetic oligonucleotide
  Mismatch hsa-miR-6878-3p MIMAT0027657
ctaggagaaaatagaggccag

SEQ ID NO: 6603 - DNA, 22 bp, Artificial Sequence
  Synthetic oligonucleotide
  Mismatch hsa-miR-183-5p MIMAT0000261
agtgaattctattagtgccata

SEQ ID NO: 6604 - DNA, 22 bp, Artificial Sequence
  Synthetic oligonucleotide
  Mismatch hsa-miR-544a MIMAT0003164
gaacttgctaattatgcagaat

SEQ ID NO: 6605 - DNA, 22 bp, Artificial Sequence
  Synthetic oligonucleotide
  Mismatch hsa-miR-135b-3p MIMAT0004698
cccatggctttctgccctacat

SEQ ID NO: 6606 - DNA, 20 bp, Artificial Sequence
  Synthetic oligonucleotide
  Mismatch hsa-miR-7973 MIMAT0031176
gtaattatttcagggtcaca

SEQ ID NO: 6607 - DNA, 22 bp, Artificial Sequence
  Synthetic oligonucleotide
  Mismatch hsa-miR-548ai MIMAT0018989
gggaaaaactgttattaccttt

SEQ ID NO: 6608 - DNA, 22 bp, Artificial Sequence
  Synthetic oligonucleotide
  Mismatch hsa-miR-501-3p MIMAT0004774
agaatccttgcttgggtgcatt

SEQ ID NO: 6609 - DNA, 22 bp, Artificial Sequence
  Synthetic oligonucleotide
  Mismatch hsa-miR-4695-5p MIMAT0019788
cctgctcgccctttgcctcctg

SEQ ID NO: 6610 - DNA, 21 bp, Artificial Sequence
  Synthetic oligonucleotide
  Mismatch hsa-miR-1251-3p MIMAT0026741
ctacactggccaagcaaagcg

SEQ ID NO: 6611 - DNA, 22 bp, Artificial Sequence
  Synthetic oligonucleotide
  Mismatch hsa-miR-4692 MIMAT0019783
atctgatacccttactgcctga

SEQ ID NO: 6612 - DNA, 23 bp, Artificial Sequence
  Synthetic oligonucleotide
  Mismatch hsa-miR-103b MIMAT0007402
agcagcattgtattgggctatga

SEQ ID NO: 6613 - DNA, 22 bp, Artificial Sequence
  Synthetic oligonucleotide
  Mismatch hsa-miR-548ao-5p MIMAT0021029
tgcaaaaaccgctgttacttct

SEQ ID NO: 6614 - DNA, 18 bp, Artificial Sequence
  Synthetic oligonucleotide
  Mismatch hsa-miR-3665 MIMAT0018087
cgccgccttgcacctgct

SEQ ID NO: 6615 - DNA, 21 bp, Artificial Sequence
  Synthetic oligonucleotide
  Mismatch hsa-miR-524-3p MIMAT0002850
actccaaaggatagcgccttc

SEQ ID NO: 6616 - DNA, 22 bp, Artificial Sequence
  Synthetic oligonucleotide
  Mismatch hsa-miR-214-3p MIMAT0000271
actgcctgtctacgcctgctgt

SEQ ID NO: 6617 - DNA, 21 bp, Artificial Sequence
  Synthetic oligonucleotide
  Mismatch hsa-miR-1197 MIMAT0005955
agaagtagactttgtgtccta

SEQ ID NO: 6618 - DNA, 18 bp, Artificial Sequence
  Synthetic oligonucleotide
  Mismatch hsa-miR-6087 MIMAT0023712
gctcgccttcccgcctca

SEQ ID NO: 6619 - DNA, 19 bp, Artificial Sequence
  Synthetic oligonucleotide
  Mismatch hsa-miR-3141 MIMAT0015010
tcctcctcttcccgccctc

SEQ ID NO: 6620 - DNA, 21 bp, Artificial Sequence
  Synthetic oligonucleotide
  Mismatch hsa-miR-6885-3p MIMAT0027671
ctaggggagctagaagcaaag

SEQ ID NO: 6621 - DNA, 23 bp, Artificial Sequence
  Synthetic oligonucleotide
  Mismatch hsa-miR-346 MIMAT0000773
agaggcaggcatatgggcagaca

SEQ ID NO: 6622 - DNA, 22 bp, Artificial Sequence
  Synthetic oligonucleotide
  Mismatch hsa-miR-21-5p MIMAT0000076
tcaacatcagttcgataagcta

SEQ ID NO: 6623 - DNA, 22 bp, Artificial Sequence
  Synthetic oligonucleotide
  Mismatch hsa-miR-197-3p MIMAT0000227
gctgggtggagttggtggtgaa

SEQ ID NO: 6624 - DNA, 22 bp, Artificial Sequence
  Synthetic oligonucleotide
  Mismatch hsa-miR-5582-3p MIMAT0022280
cctaggcacacccaaagtttta

SEQ ID NO: 6625 - DNA, 22 bp, Artificial Sequence
  Synthetic oligonucleotide
  Mismatch hsa-miR-4786-5p MIMAT0019954
ggtgcatccagctctggtctca

SEQ ID NO: 6626 - DNA, 16 bp, Artificial Sequence
  Synthetic oligonucleotide
  Mismatch hsa-miR-4485-5p MIMAT0032116
tcactaagcaggcggt

SEQ ID NO: 6627 - DNA, 21 bp, Artificial Sequence
  Synthetic oligonucleotide
  Mismatch hsa-miR-205-3p MIMAT0009197
gaacttcactttactgaaatc

SEQ ID NO: 6628 - DNA, 22 bp, Artificial Sequence
  Synthetic oligonucleotide
  Mismatch hsa-miR-513c-5p MIMAT0005789
ataaacgacactcccttgagaa

SEQ ID NO: 6629 - DNA, 21 bp, Artificial Sequence
  Synthetic oligonucleotide
  Mismatch hsa-miR-8066 MIMAT0030993
tacatccaaataatcacattg

SEQ ID NO: 6630 - DNA, 23 bp, Artificial Sequence
  Synthetic oligonucleotide
  Mismatch hsa-miR-145-5p MIMAT0000437
agggattcctggataaactggac

SEQ ID NO: 6631 - DNA, 22 bp, Artificial Sequence
  Synthetic oligonucleotide
  Mismatch hsa-miR-5693 MIMAT0022486
gagttcatttctaagccactgc

SEQ ID NO: 6632 - DNA, 22 bp, Artificial Sequence
  Synthetic oligonucleotide
  Mismatch hsa-miR-4801 MIMAT0019980
tgagccttggtcctcttgtgta

SEQ ID NO: 6633 - DNA, 22 bp, Artificial Sequence
  Synthetic oligonucleotide
  Mismatch hsa-miR-4780 MIMAT0019939
gctagggatcaaactcaagggt

SEQ ID NO: 6634 - DNA, 22 bp, Artificial Sequence
  Synthetic oligonucleotide
  Mismatch hsa-miR-3935 MIMAT0018350
gtggctggtgcctgtatctaca

SEQ ID NO: 6635 - DNA, 23 bp, Artificial Sequence
  Synthetic oligonucleotide
  Mismatch hsa-miR-602 MIMAT0003270
gggccgcagctgctgcccgtgtc

SEQ ID NO: 6636 - DNA, 21 bp, Artificial Sequence
  Synthetic oligonucleotide
  Mismatch hsa-miR-2355-5p MIMAT0016895
ttgtccattgcttctggggat

SEQ ID NO: 6637 - DNA, 24 bp, Artificial Sequence
  Synthetic oligonucleotide
  Mismatch hsa-miR-8065 MIMAT0030992
agccaaaattcaatcgttcctaca

SEQ ID NO: 6638 - DNA, 19 bp, Artificial Sequence
  Synthetic oligonucleotide
  Mismatch hsa-miR-4252 MIMAT0016886
tggtgctgtttcagtggcc

SEQ ID NO: 6639 - DNA, 20 bp, Artificial Sequence
  Synthetic oligonucleotide
  Mismatch hsa-miR-4768-3p MIMAT0019921
attctctctaaatctcctgg

SEQ ID NO: 6640 - DNA, 21 bp, Artificial Sequence
  Synthetic oligonucleotide
  Mismatch hsa-miR-552-5p MIMAT0026615
ccaacaggcattaggttaaac

SEQ ID NO: 6641 - DNA, 19 bp, Artificial Sequence
  Synthetic oligonucleotide
  Mismatch hsa-miR-668-5p MIMAT0026636
catgctcattcgaggcgca

SEQ ID NO: 6642 - DNA, 22 bp, Artificial Sequence
  Synthetic oligonucleotide
  Mismatch hsa-miR-5582-5p MIMAT0022279
gctataactttttgtgtgccta

SEQ ID NO: 6643 - DNA, 20 bp, Artificial Sequence
  Synthetic oligonucleotide
  Mismatch hsa-miR-6124 MIMAT0024597
tcctcccccccccttttccc

SEQ ID NO: 6644 - DNA, 20 bp, Artificial Sequence
  Synthetic oligonucleotide
  Mismatch hsa-miR-4453 MIMAT0018975
aaccgctactaaccaagctc

SEQ ID NO: 6645 - DNA, 22 bp, Artificial Sequence
  Synthetic oligonucleotide
  Mismatch hsa-miR-3689b-3p MIMAT0018181
accacaatatcttacctcccag

SEQ ID NO: 6646 - DNA, 22 bp, Artificial Sequence
  Synthetic oligonucleotide
  Mismatch hsa-miR-433-3p MIMAT0001627
acaccgaggagttcatcatgat

SEQ ID NO: 6647 - DNA, 22 bp, Artificial Sequence
  Synthetic oligonucleotide
  Mismatch hsa-miR-187-5p MIMAT0004561
gcccgggtcctacgttgtagcc

SEQ ID NO: 6648 - DNA, 22 bp, Artificial Sequence
  Synthetic oligonucleotide
  Mismatch hsa-miR-1293 MIMAT0005883
gcacaaatctcttgaccaccca

SEQ ID NO: 6649 - DNA, 20 bp, Artificial Sequence
  Synthetic oligonucleotide
  Mismatch hsa-miR-613 MIMAT0003281
ggcaaagaaaaaacattcct

SEQ ID NO: 6650 - DNA, 22 bp, Artificial Sequence
  Synthetic oligonucleotide
  Mismatch hsa-miR-6830-5p MIMAT0027560
gatgtccagccctcttccttgg

SEQ ID NO: 6651 - DNA, 20 bp, Artificial Sequence
  Synthetic oligonucleotide
  Mismatch hsa-miR-4749-3p MIMAT0019886
ctgtgggggttggaggggcg

SEQ ID NO: 6652 - DNA, 22 bp, Artificial Sequence
  Synthetic oligonucleotide
  Mismatch hsa-miR-1225-3p MIMAT0005573
ctgggggcggcttaggggctca

SEQ ID NO: 6653 - DNA, 22 bp, Artificial Sequence
  Synthetic oligonucleotide
  Mismatch hsa-miR-4643 MIMAT0019703
ttagcatttataatcatgtgtc

SEQ ID NO: 6654 - DNA, 20 bp, Artificial Sequence
  Synthetic oligonucleotide
  Mismatch hsa-miR-6850-3p MIMAT0027601
agtgcggcgccccggccggg

SEQ ID NO: 6655 - DNA, 23 bp, Artificial Sequence
  Synthetic oligonucleotide
  Mismatch hsa-miR-302d-3p MIMAT0000718
acactcaaacataaaagcactta

SEQ ID NO: 6656 - DNA, 22 bp, Artificial Sequence
  Synthetic oligonucleotide
  Mismatch hsa-miR-210-3p MIMAT0000267
tcagccgctgtttcacgcacag

SEQ ID NO: 6657 - DNA, 23 bp, Artificial Sequence
  Synthetic oligonucleotide
  Mismatch hsa-miR-6762-5p MIMAT0027424
acacaggctgctttatggccccg

SEQ ID NO: 6658 - DNA, 21 bp, Artificial Sequence
  Synthetic oligonucleotide
  Mismatch hsa-miR-3177-3p MIMAT0015054
acgtgtcccctatgccgtgca

SEQ ID NO: 6659 - DNA, 22 bp, Artificial Sequence
  Synthetic oligonucleotide
  Mismatch hsa-miR-4687-5p MIMAT0019774
tttgggtgcggatggagggctg

SEQ ID NO: 6660 - DNA, 23 bp, Artificial Sequence
  Synthetic oligonucleotide
  Mismatch hsa-miR-2682-5p MIMAT0013517
gacgtctgaacaaccactgcctg

SEQ ID NO: 6661 - DNA, 22 bp, Artificial Sequence
  Synthetic oligonucleotide
  Mismatch hsa-miR-520f-3p MIMAT0002830
aaccctctaaatagaagcactt

SEQ ID NO: 6662 - DNA, 21 bp, Artificial Sequence
  Synthetic oligonucleotide
  Mismatch hsa-miR-656-5p MIMAT0026627
tgaacacctcttaggcaacct

SEQ ID NO: 6663 - DNA, 23 bp, Artificial Sequence
  Synthetic oligonucleotide
  Mismatch hsa-miR-5197-3p MIMAT0021131
attcgatgactctatctcttctt

SEQ ID NO: 6664 - DNA, 22 bp, Artificial Sequence
  Synthetic oligonucleotide
  Mismatch hsa-miR-487a-3p MIMAT0002178
aactggatgtctttgtatgatt

SEQ ID NO: 6665 - DNA, 22 bp, Artificial Sequence
  Synthetic oligonucleotide
  Mismatch hsa-miR-30d-5p MIMAT0000245
cttccagtcggaaatgtttaca

SEQ ID NO: 6666 - DNA, 18 bp, Artificial Sequence
  Synthetic oligonucleotide
  Mismatch hsa-miR-548av-5p MIMAT0022303
aaatccgttagtactttt

SEQ ID NO: 6667 - DNA, 21 bp, Artificial Sequence
  Synthetic oligonucleotide
  Mismatch hsa-miR-6827-3p MIMAT0027555
ctggggaacaatagagacggt

SEQ ID NO: 6668 - DNA, 22 bp, Artificial Sequence
  Synthetic oligonucleotide
  Mismatch hsa-miR-518d-5p MIMAT0005456
cagaaagtgctctcctctagag

SEQ ID NO: 6669 - DNA, 24 bp, Artificial Sequence
  Synthetic oligonucleotide
  Mismatch hsa-miR-637 MIMAT0003307
acgcagagcccgattgcccccagt

SEQ ID NO: 6670 - DNA, 22 bp, Artificial Sequence
  Synthetic oligonucleotide
  Mismatch hsa-miR-4740-5p MIMAT0019869
cctgcccgagaaaatcagtcct

SEQ ID NO: 6671 - DNA, 21 bp, Artificial Sequence
  Synthetic oligonucleotide
  Mismatch hsa-miR-7108-5p MIMAT0028113
ccacccgcctatcggccacac

SEQ ID NO: 6672 - DNA, 23 bp, Artificial Sequence
  Synthetic oligonucleotide
  Mismatch hsa-miR-6887-5p MIMAT0027674
tgtcctctccattcgtcccccca

SEQ ID NO: 6673 - DNA, 21 bp, Artificial Sequence
  Synthetic oligonucleotide
  Mismatch hsa-miR-520b MIMAT0002843
ccctctaaaaaaaagcacttt

SEQ ID NO: 6674 - DNA, 23 bp, Artificial Sequence
  Synthetic oligonucleotide
  Mismatch hsa-miR-3690 MIMAT0018119
ctttgtctacgccaggtccaggt

SEQ ID NO: 6675 - DNA, 23 bp, Artificial Sequence
  Synthetic oligonucleotide
  Mismatch hsa-miR-34b-5p MIMAT0000685
caatcagctaatatcactgccta

SEQ ID NO: 6676 - DNA, 23 bp, Artificial Sequence
  Synthetic oligonucleotide
  Mismatch hsa-miR-6786-3p MIMAT0027473
aggcagaatcagttggggcgtca

SEQ ID NO: 6677 - DNA, 22 bp, Artificial Sequence
  Synthetic oligonucleotide
  Mismatch hsa-miR-518a-3p MIMAT0002863
tccagcaaaggatagcgctttc

SEQ ID NO: 6678 - DNA, 19 bp, Artificial Sequence
  Synthetic oligonucleotide
  Mismatch hsa-miR-645 MIMAT0003315
tcagcagtttcagcctaga

SEQ ID NO: 6679 - DNA, 22 bp, Artificial Sequence
  Synthetic oligonucleotide
  Mismatch hsa-miR-3975 MIMAT0019360
gtgaagtagtgttttagcctca

SEQ ID NO: 6680 - DNA, 23 bp, Artificial Sequence
  Synthetic oligonucleotide
  Mismatch hsa-miR-17-5p MIMAT0000070
ctacctgcactgctagcactttg

SEQ ID NO: 6681 - DNA, 20 bp, Artificial Sequence
  Synthetic oligonucleotide
  Mismatch hsa-miR-4524b-3p MIMAT0022256
tagcagcatatacctgtctc

SEQ ID NO: 6682 - DNA, 22 bp, Artificial Sequence
  Synthetic oligonucleotide
  Mismatch hsa-miR-6895-3p MIMAT0027691
ctaaggccaagaacgagagaca

SEQ ID NO: 6683 - DNA, 22 bp, Artificial Sequence
  Synthetic oligonucleotide
  Mismatch hsa-miR-6873-5p MIMAT0027646
attgccctctgctttccctctg

SEQ ID NO: 6684 - DNA, 21 bp, Artificial Sequence
  Synthetic oligonucleotide
  Mismatch hsa-miR-4674 MIMAT0019756
agccgcgcgtttcgagcccag

SEQ ID NO: 6685 - DNA, 22 bp, Artificial Sequence
  Synthetic oligonucleotide
  Mismatch hsa-miR-3200-5p MIMAT0017392
accttgtgcgctctctcagatt

SEQ ID NO: 6686 - DNA, 21 bp, Artificial Sequence
  Synthetic oligonucleotide
  Mismatch hsa-miR-2909 MIMAT0013863
ccaagagatgccggccctaac

SEQ ID NO: 6687 - DNA, 23 bp, Artificial Sequence
  Synthetic oligonucleotide
  Mismatch hsa-miR-4730 MIMAT0019852
tggcatggaatgaactccgccag

SEQ ID NO: 6688 - DNA, 22 bp, Artificial Sequence
  Synthetic oligonucleotide
  Mismatch hsa-miR-3681-5p MIMAT0018108
gcacagagtgctccatccacta

SEQ ID NO: 6689 - DNA, 22 bp, Artificial Sequence
  Synthetic oligonucleotide
  Mismatch hsa-miR-6876-5p MIMAT0027652
tgaactgcctgcttccttcctg

SEQ ID NO: 6690 - DNA, 23 bp, Artificial Sequence
  Synthetic oligonucleotide
  Mismatch hsa-miR-302b-3p MIMAT0000715
ctactaaaacataaaagcactta

SEQ ID NO: 6691 - DNA, 22 bp, Artificial Sequence
  Synthetic oligonucleotide
  Mismatch hsa-miR-92b-3p MIMAT0003218
ggaggccgggataagtgcaata

SEQ ID NO: 6692 - DNA, 21 bp, Artificial Sequence
  Synthetic oligonucleotide
  Mismatch hsa-miR-3140-5p MIMAT0019204
aaagcttttgacaattcaggt

SEQ ID NO: 6693 - DNA, 22 bp, Artificial Sequence
  Synthetic oligonucleotide
  Mismatch hsa-miR-3680-5p MIMAT0018106
tgcacaatcctacgagtgagtc

SEQ ID NO: 6694 - DNA, 23 bp, Artificial Sequence
  Synthetic oligonucleotide
  Mismatch hsa-miR-8069 MIMAT0030996
acgccgaccgccttcaaccatcc

SEQ ID NO: 6695 - DNA, 22 bp, Artificial Sequence
  Synthetic oligonucleotide
  Mismatch hsa-miR-6506-3p MIMAT0025469
gtgtctggaattcctgatacga

SEQ ID NO: 6696 - DNA, 20 bp, Artificial Sequence
  Synthetic oligonucleotide
  Mismatch hsa-miR-3187-3p MIMAT0015069
ccgcgcagcttcatggccaa

SEQ ID NO: 6697 - DNA, 22 bp, Artificial Sequence
  Synthetic oligonucleotide
  Mismatch hsa-miR-758-5p MIMAT0022929
gtgtgctctctaatcaaccatc

SEQ ID NO: 6698 - DNA, 23 bp, Artificial Sequence
  Synthetic oligonucleotide
  Mismatch hsa-miR-5089-3p MIMAT0022984
tcagtgggatttttgagtagcat

SEQ ID NO: 6699 - DNA, 23 bp, Artificial Sequence
  Synthetic oligonucleotide
  Mismatch hsa-miR-3977 MIMAT0019362
taaggttaattataatgaagcac

SEQ ID NO: 6700 - DNA, 22 bp, Artificial Sequence
  Synthetic oligonucleotide
  Mismatch hsa-miR-5682 MIMAT0022470
accttatcctgttaggtgctac

SEQ ID NO: 6701 - DNA, 22 bp, Artificial Sequence
  Synthetic oligonucleotide
  Mismatch hsa-miR-377-5p MIMAT0004689
gaattcaccaaaagcaacctct

SEQ ID NO: 6702 - DNA, 22 bp, Artificial Sequence
  Synthetic oligonucleotide
  Mismatch hsa-miR-4695-3p MIMAT0019789
gaaggaggcagtagtgagatca

SEQ ID NO: 6703 - DNA, 20 bp, Artificial Sequence
  Synthetic oligonucleotide
  Mismatch hsa-miR-562 MIMAT0003226
gcaaatggtttagctacttt

SEQ ID NO: 6704 - DNA, 17 bp, Artificial Sequence
  Synthetic oligonucleotide
  Mismatch hsa-miR-4328 MIMAT0016926
aatcctaagaaaactgg

SEQ ID NO: 6705 - DNA, 20 bp, Artificial Sequence
  Synthetic oligonucleotide
  Mismatch hsa-miR-202-3p MIMAT0002811
ttcccatgctttatacctct

SEQ ID NO: 6706 - DNA, 21 bp, Artificial Sequence
  Synthetic oligonucleotide
  Mismatch hsa-miR-5196-3p MIMAT0021129
ctgggagggaatcgaggatga

SEQ ID NO: 6707 - DNA, 18 bp, Artificial Sequence
  Synthetic oligonucleotide
  Mismatch hsa-miR-4314 MIMAT0016868
ctgtccctcttcccagag

SEQ ID NO: 6708 - DNA, 22 bp, Artificial Sequence
  Synthetic oligonucleotide
  Mismatch hsa-miR-3681-3p MIMAT0018109
agtagtggatgttgcactgtgt

SEQ ID NO: 6709 - DNA, 21 bp, Artificial Sequence
  Synthetic oligonucleotide
  Mismatch hsa-miR-2114-3p MIMAT0011157
aagtcccttgtctgaggctcg

SEQ ID NO: 6710 - DNA, 22 bp, Artificial Sequence
  Synthetic oligonucleotide
  Mismatch hsa-miR-5692a MIMAT0022484
acacccactgtaatattatttg

SEQ ID NO: 6711 - DNA, 22 bp, Artificial Sequence
  Synthetic oligonucleotide
  Mismatch hsa-miR-615-5p MIMAT0004804
gatccgagcactagggaccccc

SEQ ID NO: 6712 - DNA, 22 bp, Artificial Sequence
  Synthetic oligonucleotide
  Mismatch hsa-miR-3677-3p MIMAT0018101
ggccgtggccaatgcccacgag

SEQ ID NO: 6713 - DNA, 22 bp, Artificial Sequence
  Synthetic oligonucleotide
  Mismatch hsa-miR-138-1-3p MIMAT0004607
ggccctggtgtcatgaagtagc

SEQ ID NO: 6714 - DNA, 24 bp, Artificial Sequence
  Synthetic oligonucleotide
  Mismatch hsa-miR-4641 MIMAT0019701
tgaggcaaaagtacagcatgggca

SEQ ID NO: 6715 - DNA, 22 bp, Artificial Sequence
  Synthetic oligonucleotide
  Mismatch hsa-miR-370-5p MIMAT0026483
gtaactgcagaatcgtgacctg

SEQ ID NO: 6716 - DNA, 23 bp, Artificial Sequence
  Synthetic oligonucleotide
  Mismatch hsa-miR-4732-5p MIMAT0019855
agcttcctgctctttgctctaca

SEQ ID NO: 6717 - DNA, 21 bp, Artificial Sequence
  Synthetic oligonucleotide
  Mismatch hsa-miR-6760-3p MIMAT0027421
ctggggagaaaaggacagtgt

SEQ ID NO: 6718 - DNA, 18 bp, Artificial Sequence
  Synthetic oligonucleotide
  Mismatch hsa-miR-7162-5p MIMAT0028234
cagctgaataaggaagca

SEQ ID NO: 6719 - DNA, 24 bp, Artificial Sequence
  Synthetic oligonucleotide
  Mismatch hsa-miR-8060 MIMAT0030987
gtcctcctacccatcgcttcatgg

SEQ ID NO: 6720 - DNA, 21 bp, Artificial Sequence
  Synthetic oligonucleotide
  Mismatch hsa-miR-1237-5p MIMAT0022946
cgcgcttcggttccgcccccg

SEQ ID NO: 6721 - DNA, 22 bp, Artificial Sequence
  Synthetic oligonucleotide
  Mismatch hsa-miR-4421 MIMAT0018934
tagctcctttcttcagacaggt

SEQ ID NO: 6722 - DNA, 17 bp, Artificial Sequence
  Synthetic oligonucleotide
  Mismatch hsa-miR-3195 MIMAT0015079
aacccgaacccggcgcg

SEQ ID NO: 6723 - DNA, 22 bp, Artificial Sequence
  Synthetic oligonucleotide
  Mismatch hsa-miR-193a-5p MIMAT0004614
tcatctcgcccataaagaccca

SEQ ID NO: 6724 - DNA, 17 bp, Artificial Sequence
  Synthetic oligonucleotide
  Mismatch hsa-miR-4486 MIMAT0019020
tgccagtttcgcccagc

SEQ ID NO: 6725 - DNA, 17 bp, Artificial Sequence
  Synthetic oligonucleotide
  Mismatch hsa-miR-4534 MIMAT0019073
agaccctccctccatcc

SEQ ID NO: 6726 - DNA, 22 bp, Artificial Sequence
  Synthetic oligonucleotide
  Mismatch hsa-miR-2278 MIMAT0011778
ccaggcaacacttactgctctc

SEQ ID NO: 6727 - DNA, 21 bp, Artificial Sequence
  Synthetic oligonucleotide
  Mismatch hsa-miR-892c-5p MIMAT0025857
tgactggcactcttctgaata

SEQ ID NO: 6728 - DNA, 21 bp, Artificial Sequence
  Synthetic oligonucleotide
  Mismatch hsa-miR-1179 MIMAT0005824
ccaaccaatgttagaatgctt

SEQ ID NO: 6729 - DNA, 20 bp, Artificial Sequence
  Synthetic oligonucleotide
  Mismatch hsa-miR-6834-3p MIMAT0027569
tgatggaggattgggacata

SEQ ID NO: 6730 - DNA, 22 bp, Artificial Sequence
  Synthetic oligonucleotide
  Mismatch hsa-miR-380-5p MIMAT0000734
gcgcatgttcttcggtcaacca

SEQ ID NO: 6731 - DNA, 22 bp, Artificial Sequence
  Synthetic oligonucleotide
  Mismatch hsa-miR-6759-3p MIMAT0027419
ctgaggggagaaacaaaggtca

SEQ ID NO: 6732 - DNA, 23 bp, Artificial Sequence
  Synthetic oligonucleotide
  Mismatch hsa-miR-19b-1-5p MIMAT0004491
gctggatgcaaatttgcaaaact

SEQ ID NO: 6733 - DNA, 23 bp, Artificial Sequence
  Synthetic oligonucleotide
  Mismatch hsa-miR-500a-5p MIMAT0004773
tctcacccaggttacaaggatta

SEQ ID NO: 6734 - DNA, 22 bp, Artificial Sequence
  Synthetic oligonucleotide
  Mismatch hsa-miR-744-5p MIMAT0004945
tgctgttagcctcagccccgca

SEQ ID NO: 6735 - DNA, 22 bp, Artificial Sequence
  Synthetic oligonucleotide
  Mismatch hsa-miR-26a-2-3p MIMAT0004681
gaaacaagtaactaagaatagg

SEQ ID NO: 6736 - DNA, 23 bp, Artificial Sequence
  Synthetic oligonucleotide
  Mismatch hsa-miR-3605-3p MIMAT0017982
ctagaggacaggctacacggagg

SEQ ID NO: 6737 - DNA, 22 bp, Artificial Sequence
  Synthetic oligonucleotide
  Mismatch hsa-miR-34a-3p MIMAT0004557
agggcagtatatctgctgattg

SEQ ID NO: 6738 - DNA, 22 bp, Artificial Sequence
  Synthetic oligonucleotide
  Mismatch hsa-miR-4677-3p MIMAT0019761
agtagttctttaatctcacaga

SEQ ID NO: 6739 - DNA, 20 bp, Artificial Sequence
  Synthetic oligonucleotide
  Mismatch hsa-miR-3653-5p MIMAT0032110
gaagaagaactatcaggagg

SEQ ID NO: 6740 - DNA, 22 bp, Artificial Sequence
  Synthetic oligonucleotide
  Mismatch hsa-miR-758-3p MIMAT0003879
ggttagtggacttggtcacaaa

SEQ ID NO: 6741 - DNA, 22 bp, Artificial Sequence
  Synthetic oligonucleotide
  Mismatch hsa-miR-3122 MIMAT0014984
aagaccgtccttctgtcccaac

SEQ ID NO: 6742 - DNA, 20 bp, Artificial Sequence
  Synthetic oligonucleotide
  Mismatch hsa-miR-6732-5p MIMAT0027365
ggccagcctatcacccccta

SEQ ID NO: 6743 - DNA, 18 bp, Artificial Sequence
  Synthetic oligonucleotide
  Mismatch hsa-miR-4274 MIMAT0016906
cagggggtaggactgctg

SEQ ID NO: 6744 - DNA, 23 bp, Artificial Sequence
  Synthetic oligonucleotide
  Mismatch hsa-miR-598-5p MIMAT0026620
gctcacaccatcaagatcaccgc

SEQ ID NO: 6745 - DNA, 22 bp, Artificial Sequence
  Synthetic oligonucleotide
  Mismatch hsa-miR-4465 MIMAT0018992
tcccctggtcaatctacttgag

SEQ ID NO: 6746 - DNA, 21 bp, Artificial Sequence
  Synthetic oligonucleotide
  Mismatch hsa-miR-548ar-3p MIMAT0022266
gcaaaaataatcgcagtttta

SEQ ID NO: 6747 - DNA, 21 bp, Artificial Sequence
  Synthetic oligonucleotide
  Mismatch hsa-miR-4690-3p MIMAT0019780
cagaggcctctactgggctgc

SEQ ID NO: 6748 - DNA, 22 bp, Artificial Sequence
  Synthetic oligonucleotide
  Mismatch hsa-miR-202-5p MIMAT0002810
caaagaagtattcgcataggaa

SEQ ID NO: 6749 - DNA, 20 bp, Artificial Sequence
  Synthetic oligonucleotide
  Mismatch hsa-miR-378d MIMAT0018926
tttctgactttaagtccagt

SEQ ID NO: 6750 - DNA, 25 bp, Artificial Sequence
  Synthetic oligonucleotide
  Mismatch hsa-miR-6765-5p MIMAT0027430
acacaccctcctggttccgcctcac

SEQ ID NO: 6751 - DNA, 23 bp, Artificial Sequence
  Synthetic oligonucleotide
  Mismatch hsa-miR-6511a-5p MIMAT0025478
cctgtcagccccttttctgcctg

SEQ ID NO: 6752 - DNA, 21 bp, Artificial Sequence
  Synthetic oligonucleotide
  Mismatch hsa-miR-1267 MIMAT0005921
tggggattacttttcaacagg

SEQ ID NO: 6753 - DNA, 23 bp, Artificial Sequence
  Synthetic oligonucleotide
  Mismatch hsa-miR-4668-5p MIMAT0019745
gacaaatcctttcctttttccct

SEQ ID NO: 6754 - DNA, 22 bp, Artificial Sequence
  Synthetic oligonucleotide
  Mismatch hsa-miR-6730-3p MIMAT0027362
tgagggcagataaggtgtcagg

SEQ ID NO: 6755 - DNA, 22 bp, Artificial Sequence
  Synthetic oligonucleotide
  Mismatch hsa-miR-4671-5p MIMAT0019752
agattagcgcattgtcttcggt

SEQ ID NO: 6756 - DNA, 20 bp, Artificial Sequence
  Synthetic oligonucleotide
  Mismatch hsa-miR-920 MIMAT0004970
tactgcttcttcagctcccc

SEQ ID NO: 6757 - DNA, 23 bp, Artificial Sequence
  Synthetic oligonucleotide
  Mismatch hsa-miR-6826-5p MIMAT0027552
aggtcccacctccctcctattga

SEQ ID NO: 6758 - DNA, 22 bp, Artificial Sequence
  Synthetic oligonucleotide
  Mismatch hsa-miR-5092 MIMAT0021084
gatgccaagctttgcgtggatt

SEQ ID NO: 6759 - DNA, 22 bp, Artificial Sequence
  Synthetic oligonucleotide
  Mismatch hsa-miR-135a-3p MIMAT0004595
cgccacggctcttatccctata

SEQ ID NO: 6760 - DNA, 18 bp, Artificial Sequence
  Synthetic oligonucleotide
  Mismatch hsa-miR-516a-3p MIMAT0006778
accctctataaggaagca

SEQ ID NO: 6761 - DNA, 22 bp, Artificial Sequence
  Synthetic oligonucleotide
  Mismatch hsa-miR-548b-5p MIMAT0004798
ggccaaaaccattattactttt

SEQ ID NO: 6762 - DNA, 22 bp, Artificial Sequence
  Synthetic oligonucleotide
  Mismatch hsa-miR-4513 MIMAT0019050
atgggcctccaatcgtcagtct

SEQ ID NO: 6763 - DNA, 22 bp, Artificial Sequence
  Synthetic oligonucleotide
  Mismatch hsa-miR-518e-5p MIMAT0005450
cagaaagcgctctcctctagag

SEQ ID NO: 6764 - DNA, 22 bp, Artificial Sequence
  Synthetic oligonucleotide
  Mismatch hsa-miR-205-5p MIMAT0000266
cagactccggtaaaatgaagga

SEQ ID NO: 6765 - DNA, 19 bp, Artificial Sequence
  Synthetic oligonucleotide
  Mismatch hsa-miR-593-3p MIMAT0004802
agaaacccttgcagagaca

SEQ ID NO: 6766 - DNA, 22 bp, Artificial Sequence
  Synthetic oligonucleotide
  Mismatch hsa-miR-6836-5p MIMAT0027574
atgcctgcgcctaggccctgcg

SEQ ID NO: 6767 - DNA, 21 bp, Artificial Sequence
  Synthetic oligonucleotide
  Mismatch hsa-miR-6515-5p MIMAT0025486
gatgtcttccttaccctccaa

SEQ ID NO: 6768 - DNA, 21 bp, Artificial Sequence
  Synthetic oligonucleotide
  Mismatch hsa-miR-653-5p MIMAT0003328
cagtagagatcatttcaacac

SEQ ID NO: 6769 - DNA, 23 bp, Artificial Sequence
  Synthetic oligonucleotide
  Mismatch hsa-miR-6503-5p MIMAT0025462
tctggggatttgtttgcagacct

SEQ ID NO: 6770 - DNA, 21 bp, Artificial Sequence
  Synthetic oligonucleotide
  Mismatch hsa-miR-6504-5p MIMAT0025464
ctgcattacaatacagccaga

SEQ ID NO: 6771 - DNA, 22 bp, Artificial Sequence
  Synthetic oligonucleotide
  Mismatch hsa-miR-627-5p MIMAT0003296
tcctcttttctctgagactcac

SEQ ID NO: 6772 - DNA, 22 bp, Artificial Sequence
  Synthetic oligonucleotide
  Mismatch hsa-miR-3618 MIMAT0017998
gctcttttcatctatgtagaca

SEQ ID NO: 6773 - DNA, 21 bp, Artificial Sequence
  Synthetic oligonucleotide
  Mismatch hsa-miR-5186 MIMAT0021116
acctgatttcctccaatctct

SEQ ID NO: 6774 - DNA, 23 bp, Artificial Sequence
  Synthetic oligonucleotide
  Mismatch hsa-miR-513a-3p MIMAT0004777
ccttctcagaaaaatgaaattta

SEQ ID NO: 6775 - DNA, 22 bp, Artificial Sequence
  Synthetic oligonucleotide
  Mismatch hsa-miR-210-5p MIMAT0026475
cagtgtgcggtaagcaggggct

SEQ ID NO: 6776 - DNA, 22 bp, Artificial Sequence
  Synthetic oligonucleotide
  Mismatch hsa-miR-5196-5p MIMAT0021128
cccaaccctcgctcccttccct

SEQ ID NO: 6777 - DNA, 19 bp, Artificial Sequence
  Synthetic oligonucleotide
  Mismatch hsa-miR-6078 MIMAT0023703
ccacagcttactcaggcgg

SEQ ID NO: 6778 - DNA, 22 bp, Artificial Sequence
  Synthetic oligonucleotide
  Mismatch hsa-miR-4708-3p MIMAT0019810
atcagagagatatcgccttgct

SEQ ID NO: 6779 - DNA, 22 bp, Artificial Sequence
  Synthetic oligonucleotide
  Mismatch hsa-miR-3173-5p MIMAT0019214
aaaggagaaaattggcagggca

SEQ ID NO: 6780 - DNA, 21 bp, Artificial Sequence
  Synthetic oligonucleotide
  Mismatch hsa-miR-4748 MIMAT0019884
agcaaatcctttccaaacctc

SEQ ID NO: 6781 - DNA, 18 bp, Artificial Sequence
  Synthetic oligonucleotide
  Mismatch hsa-miR-4302 MIMAT0016855
ctcgctgtaccacactgg

SEQ ID NO: 6782 - DNA, 21 bp, Artificial Sequence
  Synthetic oligonucleotide
  Mismatch hsa-miR-4735-3p MIMAT0019861
atgtctaattcaagcaccttt

SEQ ID NO: 6783 - DNA, 22 bp, Artificial Sequence
  Synthetic oligonucleotide
  Mismatch hsa-miR-223-3p MIMAT0000280
tggggtatttgttaaactgaca

SEQ ID NO: 6784 - DNA, 21 bp, Artificial Sequence
  Synthetic oligonucleotide
  Mismatch hsa-miR-142-5p MIMAT0000433
agtagtgcttcttactttatg

SEQ ID NO: 6785 - DNA, 22 bp, Artificial Sequence
  Synthetic oligonucleotide
  Mismatch hsa-miR-6803-3p MIMAT0027507
ctgagggtgagttggcgaggga

SEQ ID NO: 6786 - DNA, 22 bp, Artificial Sequence
  Synthetic oligonucleotide
  Mismatch hsa-miR-6511a-3p MIMAT0025479
gcaggcagaagaaatggtgagg

SEQ ID NO: 6787 - DNA, 21 bp, Artificial Sequence
  Synthetic oligonucleotide
  Mismatch hsa-miR-507 MIMAT0002879
ttcactccaattggtgcaaaa

SEQ ID NO: 6788 - DNA, 22 bp, Artificial Sequence
  Synthetic oligonucleotide
  Mismatch hsa-miR-5583-5p MIMAT0022281
cagaatatgggcttattagttt

SEQ ID NO: 6789 - DNA, 24 bp, Artificial Sequence
  Synthetic oligonucleotide
  Mismatch hsa-miR-3171 MIMAT0015046
gatatatacagatctcatacatct

SEQ ID NO: 6790 - DNA, 22 bp, Artificial Sequence
  Synthetic oligonucleotide
  Mismatch hsa-miR-3908 MIMAT0018182
aaacagtctactcacattgctc

SEQ ID NO: 6791 - DNA, 21 bp, Artificial Sequence
  Synthetic oligonucleotide
  Mismatch hsa-miR-4761-5p MIMAT0019908
ggtcaggcatatacaccttgt

SEQ ID NO: 6792 - DNA, 24 bp, Artificial Sequence
  Synthetic oligonucleotide
  Mismatch hsa-miR-8053 MIMAT0030980
tgccattgagttcttaaatcgcca

SEQ ID NO: 6793 - DNA, 22 bp, Artificial Sequence
  Synthetic oligonucleotide
  Mismatch hsa-miR-186-3p MIMAT0004612
cccaaaaaattttcctttgggc

SEQ ID NO: 6794 - DNA, 22 bp, Artificial Sequence
  Synthetic oligonucleotide
  Mismatch hsa-miR-3689d MIMAT0019008
cgagtgtgagactacacctccc

SEQ ID NO: 6795 - DNA, 21 bp, Artificial Sequence
  Synthetic oligonucleotide
  Mismatch hsa-miR-6769b-3p MIMAT0027621
ctatgggtggatcagagaggg

SEQ ID NO: 6796 - DNA, 23 bp, Artificial Sequence
  Synthetic oligonucleotide
  Mismatch hsa-miR-7106-3p MIMAT0028110
ctgggacagggacccagggagct

SEQ ID NO: 6797 - DNA, 22 bp, Artificial Sequence
  Synthetic oligonucleotide
  Mismatch hsa-miR-10a-3p MIMAT0004555
tattcccctagtcacgaatttg

SEQ ID NO: 6798 - DNA, 21 bp, Artificial Sequence
  Synthetic oligonucleotide
  Mismatch hsa-miR-6815-3p MIMAT0027531
ctgggtgtgcttgagaagcca

SEQ ID NO: 6799 - DNA, 20 bp, Artificial Sequence
  Synthetic oligonucleotide
  Mismatch hsa-miR-6088 MIMAT0023713
cgcccccccatttcatctct

SEQ ID NO: 6800 - DNA, 22 bp, Artificial Sequence
  Synthetic oligonucleotide
  Mismatch hsa-miR-1-3p MIMAT0000416
atacatacttccctacattcca

SEQ ID NO: 6801 - DNA, 22 bp, Artificial Sequence
  Synthetic oligonucleotide
  Mismatch hsa-miR-200a-5p MIMAT0001620
tccagcactgtttggtaagatg

SEQ ID NO: 6802 - DNA, 22 bp, Artificial Sequence
  Synthetic oligonucleotide
  Mismatch hsa-miR-3202 MIMAT0015089
attaaagctctcttcccttcca

SEQ ID NO: 6803 - DNA, 22 bp, Artificial Sequence
  Synthetic oligonucleotide
  Mismatch hsa-miR-6833-5p MIMAT0027566
tttctcctccctccttccacac

SEQ ID NO: 6804 - DNA, 21 bp, Artificial Sequence
  Synthetic oligonucleotide
  Mismatch hsa-miR-943 MIMAT0004986
ctggaggacgataacagtcag

SEQ ID NO: 6805 - DNA, 22 bp, Artificial Sequence
  Synthetic oligonucleotide
  Mismatch hsa-miR-6883-5p MIMAT0027666
acatccataccttaccctccct

SEQ ID NO: 6806 - DNA, 20 bp, Artificial Sequence
  Synthetic oligonucleotide
  Mismatch hsa-miR-6890-3p MIMAT0027681
ctgtggggctcaggcagtgg

SEQ ID NO: 6807 - DNA, 22 bp, Artificial Sequence
  Synthetic oligonucleotide
  Mismatch hsa-let-7b-3p MIMAT0004482
gggaaggcagttagttgtatag

SEQ ID NO: 6808 - DNA, 23 bp, Artificial Sequence
  Synthetic oligonucleotide
  Mismatch hsa-miR-3149 MIMAT0015022
atacacacacattcccatacaaa

SEQ ID NO: 6809 - DNA, 23 bp, Artificial Sequence
  Synthetic oligonucleotide
  Mismatch hsa-miR-6878-5p MIMAT0027656
cttcagcttctaattttctccct

SEQ ID NO: 6810 - DNA, 22 bp, Artificial Sequence
  Synthetic oligonucleotide
  Mismatch hsa-miR-146b-3p MIMAT0004766
ccagaactgagctcacagggca

SEQ ID NO: 6811 - DNA, 22 bp, Artificial Sequence
  Synthetic oligonucleotide
  Mismatch hsa-miR-4731-5p MIMAT0019853
cacactcatgtaacccccagca

SEQ ID NO: 6812 - DNA, 21 bp, Artificial Sequence
  Synthetic oligonucleotide
  Mismatch hsa-let-7g-3p MIMAT0004584
gcaaggcagtaacctgtacag

SEQ ID NO: 6813 - DNA, 21 bp, Artificial Sequence
  Synthetic oligonucleotide
  Mismatch hsa-miR-5590-5p MIMAT0022299
aataaagtcttcgtatggcaa

SEQ ID NO: 6814 - DNA, 22 bp, Artificial Sequence
  Synthetic oligonucleotide
  Mismatch hsa-miR-551b-5p MIMAT0004794
ggtctcacccatacttgatttc

SEQ ID NO: 6815 - DNA, 23 bp, Artificial Sequence
  Synthetic oligonucleotide
  Mismatch hsa-miR-302a-5p MIMAT0000683
agcaagtacatcttcgtttaagt

SEQ ID NO: 6816 - DNA, 22 bp, Artificial Sequence
  Synthetic oligonucleotide
  Mismatch hsa-miR-769-5p MIMAT0003886
agctcagaaccttgaggtctca

SEQ ID NO: 6817 - DNA, 21 bp, Artificial Sequence
  Synthetic oligonucleotide
  Mismatch hsa-miR-3186-3p MIMAT0015068
caaagccatccttccgcgtga

SEQ ID NO: 6818 - DNA, 23 bp, Artificial Sequence
  Synthetic oligonucleotide
  Mismatch hsa-miR-19a-3p MIMAT0000073
tcagttttgcattaatttgcaca

SEQ ID NO: 6819 - DNA, 22 bp, Artificial Sequence
  Synthetic oligonucleotide
  Mismatch hsa-miR-381-5p MIMAT0022862
atatacaaaggataacctcgct

SEQ ID NO: 6820 - DNA, 22 bp, Artificial Sequence
  Synthetic oligonucleotide
  Mismatch hsa-miR-6741-3p MIMAT0027384
ctagggtgaggatgagagccga

SEQ ID NO: 6821 - DNA, 19 bp, Artificial Sequence
  Synthetic oligonucleotide
  Mismatch hsa-miR-7155-5p MIMAT0028220
gatggcccttgaccccaga

SEQ ID NO: 6822 - DNA, 19 bp, Artificial Sequence
  Synthetic oligonucleotide
  Mismatch hsa-miR-6845-5p MIMAT0027590
gctctctgtcctggccccg

SEQ ID NO: 6823 - DNA, 22 bp, Artificial Sequence
  Synthetic oligonucleotide
  Mismatch hsa-miR-544b MIMAT0015004
ttagaaatgcattacctcaggt

SEQ ID NO: 6824 - DNA, 18 bp, Artificial Sequence
  Synthetic oligonucleotide
  Mismatch hsa-miR-4505 MIMAT0019041
tccgtccttgcccagcct

SEQ ID NO: 6825 - DNA, 22 bp, Artificial Sequence
  Synthetic oligonucleotide
  Mismatch hsa-miR-8073 MIMAT0031000
acgacgctccccactgccaggt

SEQ ID NO: 6826 - DNA, 22 bp, Artificial Sequence
  Synthetic oligonucleotide
  Mismatch hsa-miR-4633-3p MIMAT0019690
tgcatatgcctaactagctcct

SEQ ID NO: 6827 - DNA, 22 bp, Artificial Sequence
  Synthetic oligonucleotide
  Mismatch hsa-miR-4694-5p MIMAT0019786
gcaaatggataaaataacacct

SEQ ID NO: 6828 - DNA, 22 bp, Artificial Sequence
  Synthetic oligonucleotide
  Mismatch hsa-miR-3677-5p MIMAT0019221
cactgcagggccttggccactg

SEQ ID NO: 6829 - DNA, 23 bp, Artificial Sequence
  Synthetic oligonucleotide
  Mismatch hsa-miR-7848-3p MIMAT0030423
tgtggtaagcagttcgagggtag

SEQ ID NO: 6830 - DNA, 22 bp, Artificial Sequence
  Synthetic oligonucleotide
  Mismatch hsa-miR-4491 MIMAT0019026
tttggtcacacttgtccacatt

SEQ ID NO: 6831 - DNA, 23 bp, Artificial Sequence
  Synthetic oligonucleotide
  Mismatch hsa-miR-668-3p MIMAT0003881
gtagtgggccgaatcgagtgaca

SEQ ID NO: 6832 - DNA, 22 bp, Artificial Sequence
  Synthetic oligonucleotide
  Mismatch hsa-miR-938 MIMAT0004981
actgggttcactcttaagggca

SEQ ID NO: 6833 - DNA, 22 bp, Artificial Sequence
  Synthetic oligonucleotide
  Mismatch hsa-miR-3074-3p MIMAT0015027
cggtgcctactatgctgatatc

SEQ ID NO: 6834 - DNA, 22 bp, Artificial Sequence
  Synthetic oligonucleotide
  Mismatch hsa-miR-6716-3p MIMAT0025845
gcagaggaatgatgagttcgga

SEQ ID NO: 6835 - DNA, 23 bp, Artificial Sequence
  Synthetic oligonucleotide
  Mismatch hsa-miR-342-3p MIMAT0000753
acgggtgcgattcttgtgtgaga

SEQ ID NO: 6836 - DNA, 22 bp, Artificial Sequence
  Synthetic oligonucleotide
  Mismatch hsa-miR-584-5p MIMAT0003249
ctcagtcccagataaaccataa

SEQ ID NO: 6837 - DNA, 18 bp, Artificial Sequence
  Synthetic oligonucleotide
  Mismatch hsa-miR-5587-5p MIMAT0022289
agtcccgatggtgaccat

SEQ ID NO: 6838 - DNA, 24 bp, Artificial Sequence
  Synthetic oligonucleotide
  Mismatch hsa-miR-298 MIMAT0004901
tgggagaacctcctcgcttctgct

SEQ ID NO: 6839 - DNA, 23 bp, Artificial Sequence
  Synthetic oligonucleotide
  Mismatch hsa-miR-8055 MIMAT0030982
tccgtctgctcacatgctcaaag

SEQ ID NO: 6840 - DNA, 22 bp, Artificial Sequence
  Synthetic oligonucleotide
  Mismatch hsa-miR-3612 MIMAT0017989
tccatttctcataatgcctcct

SEQ ID NO: 6841 - DNA, 23 bp, Artificial Sequence
  Synthetic oligonucleotide
  Mismatch hsa-miR-542-5p MIMAT0003340
tctcgtgacatgtcgatccccga

SEQ ID NO: 6842 - DNA, 23 bp, Artificial Sequence
  Synthetic oligonucleotide
  Mismatch hsa-miR-19b-3p MIMAT0000074
tcagttttgcataaatttgcaca

SEQ ID NO: 6843 - DNA, 20 bp, Artificial Sequence
  Synthetic oligonucleotide
  Mismatch hsa-miR-1231 MIMAT0005586
gcagctgtctacccagacac

SEQ ID NO: 6844 - DNA, 17 bp, Artificial Sequence
  Synthetic oligonucleotide
  Mismatch hsa-miR-4255 MIMAT0016885
tccatccttgaacactg

SEQ ID NO: 6845 - DNA, 23 bp, Artificial Sequence
  Synthetic oligonucleotide
  Mismatch hsa-miR-675-5p MIMAT0004284
cactgtgggccccttccgcacca

SEQ ID NO: 6846 - DNA, 23 bp, Artificial Sequence
  Synthetic oligonucleotide
  Mismatch hsa-miR-199a-5p MIMAT0000231
gaacaggtagtccaaacactggg

SEQ ID NO: 6847 - DNA, 22 bp, Artificial Sequence
  Synthetic oligonucleotide
  Mismatch hsa-miR-513b-5p MIMAT0005788
ataaatgacactcccttgtgaa

SEQ ID NO: 6848 - DNA, 17 bp, Artificial Sequence
  Synthetic oligonucleotide
  Mismatch hsa-miR-4455 MIMAT0018977
aaaaacttacacaccct

SEQ ID NO: 6849 - DNA, 21 bp, Artificial Sequence
  Synthetic oligonucleotide
  Mismatch hsa-miR-3682-3p MIMAT0018110
ctacctccactcgtatcatca

SEQ ID NO: 6850 - DNA, 19 bp, Artificial Sequence
  Synthetic oligonucleotide
  Mismatch hsa-miR-9500 MIMAT0035542
gtggtcactttcttccctt

SEQ ID NO: 6851 - DNA, 22 bp, Artificial Sequence
  Synthetic oligonucleotide
  Mismatch hsa-miR-6828-5p MIMAT0027556
ccacagggttcctttgcttcct

SEQ ID NO: 6852 - DNA, 21 bp, Artificial Sequence
  Synthetic oligonucleotide
  Mismatch hsa-miR-6718-5p MIMAT0025849
tcataagccccttgaccacta

SEQ ID NO: 6853 - DNA, 21 bp, Artificial Sequence
  Synthetic oligonucleotide
  Mismatch hsa-miR-939-3p MIMAT0022939
ctggggagcaatggcccaggg

SEQ ID NO: 6854 - DNA, 20 bp, Artificial Sequence
  Synthetic oligonucleotide
  Mismatch hsa-miR-548ad-5p MIMAT0032114
caaaaaccattattactttt

SEQ ID NO: 6855 - DNA, 23 bp, Artificial Sequence
  Synthetic oligonucleotide
  Mismatch hsa-miR-339-3p MIMAT0004702
cggctctgtcgttaaggcgctca

SEQ ID NO: 6856 - DNA, 22 bp, Artificial Sequence
  Synthetic oligonucleotide
  Mismatch hsa-miR-630 MIMAT0003299
accttccctggctcagaatact

SEQ ID NO: 6857 - DNA, 25 bp, Artificial Sequence
  Synthetic oligonucleotide
  Mismatch hsa-miR-4739 MIMAT0019868
agggcccctccgcttttcctccctt

SEQ ID NO: 6858 - DNA, 19 bp, Artificial Sequence
  Synthetic oligonucleotide
  Mismatch hsa-miR-1246 MIMAT0005898
cctgctccttaaatccatt

SEQ ID NO: 6859 - DNA, 23 bp, Artificial Sequence
  Synthetic oligonucleotide
  Mismatch hsa-miR-600 MIMAT0003268
gagcaaggctctcatctgtaagt

SEQ ID NO: 6860 - DNA, 22 bp, Artificial Sequence
  Synthetic oligonucleotide
  Mismatch hsa-miR-3135b MIMAT0018985
caccactgcacctgctccagcc

SEQ ID NO: 6861 - DNA, 22 bp, Artificial Sequence
  Synthetic oligonucleotide
  Mismatch hsa-miR-129-1-3p MIMAT0004548
atactttttggaataagggctt

SEQ ID NO: 6862 - DNA, 21 bp, Artificial Sequence
  Synthetic oligonucleotide
  Mismatch hsa-miR-4268 MIMAT0016896
cacatcctgaatggaggagcc

SEQ ID NO: 6863 - DNA, 22 bp, Artificial Sequence
  Synthetic oligonucleotide
  Mismatch hsa-miR-876-5p MIMAT0004924
tggtgattcacttagaaatcca

SEQ ID NO: 6864 - DNA, 22 bp, Artificial Sequence
  Synthetic oligonucleotide
  Mismatch hsa-miR-3145-5p MIMAT0019205
tgagttttgagcatttggagtt

SEQ ID NO: 6865 - DNA, 23 bp, Artificial Sequence
  Synthetic oligonucleotide
  Mismatch hsa-miR-582-5p MIMAT0003247
agtaactggttgttcaactgtaa

SEQ ID NO: 6866 - DNA, 21 bp, Artificial Sequence
  Synthetic oligonucleotide
  Mismatch hsa-miR-1470 MIMAT0007348
cggggtgcacaagcggagggc

SEQ ID NO: 6867 - DNA, 18 bp, Artificial Sequence
  Synthetic oligonucleotide
  Mismatch hsa-miR-4419b MIMAT0019034
ccatcttttttcagcctc

SEQ ID NO: 6868 - DNA, 16 bp, Artificial Sequence
  Synthetic oligonucleotide
  Mismatch hsa-miR-4291 MIMAT0016922
agctgcccctgctgaa

SEQ ID NO: 6869 - DNA, 22 bp, Artificial Sequence
  Synthetic oligonucleotide
  Mismatch hsa-miR-766-5p MIMAT0022714
aagaccagcacttattcctcct

SEQ ID NO: 6870 - DNA, 20 bp, Artificial Sequence
  Synthetic oligonucleotide
  Mismatch hsa-miR-548ae-5p MIMAT0032115
caaaaaccattattactttt

SEQ ID NO: 6871 - DNA, 22 bp, Artificial Sequence
  Synthetic oligonucleotide
  Mismatch hsa-miR-1271-3p MIMAT0022712
tgcctggcacactgcaggcact

SEQ ID NO: 6872 - DNA, 23 bp, Artificial Sequence
  Synthetic oligonucleotide
  Mismatch hsa-miR-200c-3p MIMAT0000617
tccatcattacctagcagtatta

SEQ ID NO: 6873 - DNA, 21 bp, Artificial Sequence
  Synthetic oligonucleotide
  Mismatch hsa-miR-549a MIMAT0003333
agagctcatctttagttgtca

SEQ ID NO: 6874 - DNA, 22 bp, Artificial Sequence
  Synthetic oligonucleotide
  Mismatch hsa-miR-4721 MIMAT0019835
ccaccgtcacccagagccctca

SEQ ID NO: 6875 - DNA, 23 bp, Artificial Sequence
  Synthetic oligonucleotide
  Mismatch hsa-miR-6810-5p MIMAT0027520
gccatgctgatctttgtccccat

SEQ ID NO: 6876 - DNA, 24 bp, Artificial Sequence
  Synthetic oligonucleotide
  Mismatch hsa-miR-6853-5p MIMAT0027606
ctgacttcatggatttcccacgct

SEQ ID NO: 6877 - DNA, 23 bp, Artificial Sequence
  Synthetic oligonucleotide
  Mismatch hsa-miR-4744 MIMAT0019875
catagcgaagtcctgtctttaga

SEQ ID NO: 6878 - DNA, 24 bp, Artificial Sequence
  Synthetic oligonucleotide
  Mismatch hsa-miR-3670 MIMAT0018093
tagagaaggacagtcgtgagctct

SEQ ID NO: 6879 - DNA, 21 bp, Artificial Sequence
  Synthetic oligonucleotide
  Mismatch hsa-miR-3925-3p MIMAT0019228
caagagaactttaactggagt

SEQ ID NO: 6880 - DNA, 22 bp, Artificial Sequence
  Synthetic oligonucleotide
  Mismatch hsa-miR-17-3p MIMAT0000071
ctacaagtgcccccactgcagt

SEQ ID NO: 6881 - DNA, 22 bp, Artificial Sequence
  Synthetic oligonucleotide
  Mismatch hsa-miR-4652-3p MIMAT0019717
tgaggggatggactaacagaac

SEQ ID NO: 6882 - DNA, 22 bp, Artificial Sequence
  Synthetic oligonucleotide
  Mismatch hsa-miR-5585-5p MIMAT0022285
ctctcgagtagtcggtacttca

SEQ ID NO: 6883 - DNA, 22 bp, Artificial Sequence
  Synthetic oligonucleotide
  Mismatch hsa-miR-196b-3p MIMAT0009201
gaaggcagtgttatgctgtcga

SEQ ID NO: 6884 - DNA, 22 bp, Artificial Sequence
  Synthetic oligonucleotide
  Mismatch hsa-miR-196a-3p MIMAT0004562
ctcaggcagttctttgttgccg

SEQ ID NO: 6885 - DNA, 22 bp, Artificial Sequence
  Synthetic oligonucleotide
  Mismatch hsa-miR-3200-3p MIMAT0015085
cagacctgagttacgcaaggtg

SEQ ID NO: 6886 - DNA, 18 bp, Artificial Sequence
  Synthetic oligonucleotide
  Mismatch hsa-miR-320e MIMAT0015072
ccttctcttcccagcttt

SEQ ID NO: 6887 - DNA, 21 bp, Artificial Sequence
  Synthetic oligonucleotide
  Mismatch hsa-miR-4433a-5p MIMAT0020956
acaggagtggaaggtgggacg

SEQ ID NO: 6888 - DNA, 21 bp, Artificial Sequence
  Synthetic oligonucleotide
  Mismatch hsa-miR-4804-3p MIMAT0019985
tttcgagggcttggttaagca

SEQ ID NO: 6889 - DNA, 22 bp, Artificial Sequence
  Synthetic oligonucleotide
  Mismatch hsa-miR-548ba MIMAT0031175
agcaaaaatcattgttaccttt

SEQ ID NO: 6890 - DNA, 22 bp, Artificial Sequence
  Synthetic oligonucleotide
  Mismatch hsa-miR-3689a-3p MIMAT0018118
accacgatatcttacctcccag

SEQ ID NO: 6891 - DNA, 22 bp, Artificial Sequence
  Synthetic oligonucleotide
  Mismatch hsa-miR-548d-3p MIMAT0003323
gcaaaagaaaccatggtttttg

SEQ ID NO: 6892 - DNA, 23 bp, Artificial Sequence
  Synthetic oligonucleotide
  Mismatch hsa-miR-8080 MIMAT0031007
agccgttgacacttgtgtccttc

SEQ ID NO: 6893 - DNA, 22 bp, Artificial Sequence
  Synthetic oligonucleotide
  Mismatch hsa-miR-1912 MIMAT0007887
ttcacactgcacactctgggta

SEQ ID NO: 6894 - DNA, 17 bp, Artificial Sequence
  Synthetic oligonucleotide
  Mismatch hsa-miR-4316 MIMAT0016867
caccagtcagcctcacc

SEQ ID NO: 6895 - DNA, 22 bp, Artificial Sequence
  Synthetic oligonucleotide
  Mismatch hsa-miR-548az-5p MIMAT0025456
gcaaaaaccactttcacttttg

SEQ ID NO: 6896 - DNA, 22 bp, Artificial Sequence
  Synthetic oligonucleotide
  Mismatch hsa-miR-4690-5p MIMAT0019779
ttcagcccagctccgcctgctc

SEQ ID NO: 6897 - DNA, 22 bp, Artificial Sequence
  Synthetic oligonucleotide
  Mismatch hsa-miR-4717-5p MIMAT0019829
acacatgggtgattgtggccta

SEQ ID NO: 6898 - DNA, 22 bp, Artificial Sequence
  Synthetic oligonucleotide
  Mismatch hsa-miR-3678-3p MIMAT0018103
ccggtccgtacttactctgcag

SEQ ID NO: 6899 - DNA, 21 bp, Artificial Sequence
  Synthetic oligonucleotide
  Mismatch hsa-miR-3194-5p MIMAT0015078
cagccctcctaatggctggcc

SEQ ID NO: 6900 - DNA, 22 bp, Artificial Sequence
  Synthetic oligonucleotide
  Mismatch hsa-miR-605-3p MIMAT0026621
tctaaatctcactgtgccttct

SEQ ID NO: 6901 - DNA, 22 bp, Artificial Sequence
  Synthetic oligonucleotide
  Mismatch hsa-miR-3591-3p MIMAT0019877
gtggagtgtgattatggtgttt

SEQ ID NO: 6902 - DNA, 25 bp, Artificial Sequence
  Synthetic oligonucleotide
  Mismatch hsa-miR-4706 MIMAT0019806
aagcagcgcccactctctccccgct

SEQ ID NO: 6903 - DNA, 22 bp, Artificial Sequence
  Synthetic oligonucleotide
  Mismatch hsa-miR-4725-3p MIMAT0019844
cccgacactgataccttcccca

SEQ ID NO: 6904 - DNA, 20 bp, Artificial Sequence
  Synthetic oligonucleotide
  Mismatch hsa-miR-4432 MIMAT0018948
aggcatcttatagagtcttt

SEQ ID NO: 6905 - DNA, 22 bp, Artificial Sequence
  Synthetic oligonucleotide
  Mismatch hsa-miR-7849-3p MIMAT0030424
aggcccaagatttacaattgtc

SEQ ID NO: 6906 - DNA, 23 bp, Artificial Sequence
  Synthetic oligonucleotide
  Mismatch hsa-miR-503-3p MIMAT0022925
cctggcagcggattcaatacccc

SEQ ID NO: 6907 - DNA, 21 bp, Artificial Sequence
  Synthetic oligonucleotide
  Mismatch hsa-miR-6731-3p MIMAT0027364
ctggggagagcagggaataga

SEQ ID NO: 6908 - DNA, 22 bp, Artificial Sequence
  Synthetic oligonucleotide
  Mismatch hsa-miR-1307-3p MIMAT0005951
cacgaccgacgttacgccgagt

SEQ ID NO: 6909 - DNA, 23 bp, Artificial Sequence
  Synthetic oligonucleotide
  Mismatch hsa-miR-6859-3p MIMAT0027619
ctacagaggcgatttgggggtca

SEQ ID NO: 6910 - DNA, 21 bp, Artificial Sequence
  Synthetic oligonucleotide
  Mismatch hsa-miR-376a-3p MIMAT0000729
acgtggatttctctctatgat

SEQ ID NO: 6911 - DNA, 22 bp, Artificial Sequence
  Synthetic oligonucleotide
  Mismatch hsa-miR-5000-5p MIMAT0021019
actcaggaacatctctgaactg

SEQ ID NO: 6912 - DNA, 23 bp, Artificial Sequence
  Synthetic oligonucleotide
  Mismatch hsa-miR-3065-5p MIMAT0015066
tccagcatcagtatttttgttga

SEQ ID NO: 6913 - DNA, 24 bp, Artificial Sequence
  Synthetic oligonucleotide
  Mismatch hsa-miR-6822-3p MIMAT0027545
tgcagggaaagcctattagagcct

SEQ ID NO: 6914 - DNA, 22 bp, Artificial Sequence
  Synthetic oligonucleotide
  Mismatch hsa-miR-8086 MIMAT0031013
accatatcagtttagactagca

SEQ ID NO: 6915 - DNA, 22 bp, Artificial Sequence
  Synthetic oligonucleotide
  Mismatch hsa-miR-125b-2-3p MIMAT0004603
gtcccaagagctcgacttgtga

SEQ ID NO: 6916 - DNA, 22 bp, Artificial Sequence
  Synthetic oligonucleotide
  Mismatch hsa-miR-548am-5p MIMAT0022740
ggcaaaaaccgttattactttt

SEQ ID NO: 6917 - DNA, 22 bp, Artificial Sequence
  Synthetic oligonucleotide
  Mismatch hsa-miR-323b-3p MIMAT0015050
aagaggtcgactatgtattggg

SEQ ID NO: 6918 - DNA, 21 bp, Artificial Sequence
  Synthetic oligonucleotide
  Mismatch hsa-miR-4489 MIMAT0019023
cgtcctgcatttctagcccca

SEQ ID NO: 6919 - DNA, 24 bp, Artificial Sequence
  Synthetic oligonucleotide
  Mismatch hsa-miR-6862-3p MIMAT0027626
agagggccagagaattgggtgagg

SEQ ID NO: 6920 - DNA, 22 bp, Artificial Sequence
  Synthetic oligonucleotide
  Mismatch hsa-miR-194-3p MIMAT0004671
cagataacagctaccccactgg

SEQ ID NO: 6921 - DNA, 22 bp, Artificial Sequence
  Synthetic oligonucleotide
  Mismatch hsa-miR-6772-5p MIMAT0027444
cctcagctccaatctacaccca

SEQ ID NO: 6922 - DNA, 22 bp, Artificial Sequence
  Synthetic oligonucleotide
  Mismatch hsa-miR-223-5p MIMAT0004570
aactcagcttgctaaatacacg

SEQ ID NO: 6923 - DNA, 21 bp, Artificial Sequence
  Synthetic oligonucleotide
  Mismatch hsa-miR-569 MIMAT0003234
actttccaggtctcattaact

SEQ ID NO: 6924 - DNA, 23 bp, Artificial Sequence
  Synthetic oligonucleotide
  Mismatch hsa-miR-4680-5p MIMAT0019764
acatctaagactataagagttct

SEQ ID NO: 6925 - DNA, 22 bp, Artificial Sequence
  Synthetic oligonucleotide
  Mismatch hsa-miR-1914-3p MIMAT0007890
cctcccagtgcaagacccctcc

SEQ ID NO: 6926 - DNA, 22 bp, Artificial Sequence
  Synthetic oligonucleotide
  Mismatch hsa-miR-4740-3p MIMAT0019870
gcagggacggactctctcgggc

SEQ ID NO: 6927 - DNA, 22 bp, Artificial Sequence
  Synthetic oligonucleotide
  Mismatch hsa-miR-518b MIMAT0002844
acctctaaaggaaagcgctttg

SEQ ID NO: 6928 - DNA, 21 bp, Artificial Sequence
  Synthetic oligonucleotide
  Mismatch hsa-miR-504-3p MIMAT0026612
gaaaccctgctttgcactccc

SEQ ID NO: 6929 - DNA, 21 bp, Artificial Sequence
  Synthetic oligonucleotide
  Mismatch hsa-miR-149-3p MIMAT0004609
gcacagcccctatccctccct

SEQ ID NO: 6930 - DNA, 21 bp, Artificial Sequence
  Synthetic oligonucleotide
  Mismatch hsa-miR-26b-5p MIMAT0000083
acctatcctgttttacttgaa

SEQ ID NO: 6931 - DNA, 23 bp, Artificial Sequence
  Synthetic oligonucleotide
  Mismatch hsa-miR-4758-5p MIMAT0019903
cagccccaccggtccccactcac

SEQ ID NO: 6932 - DNA, 20 bp, Artificial Sequence
  Synthetic oligonucleotide
  Mismatch hsa-miR-5708 MIMAT0022502
ggtcaggcattgtcgctcat

SEQ ID NO: 6933 - DNA, 24 bp, Artificial Sequence
  Synthetic oligonucleotide
  Mismatch hsa-miR-573 MIMAT0003238
ctgatcagttacatttcacttcag

SEQ ID NO: 6934 - DNA, 21 bp, Artificial Sequence
  Synthetic oligonucleotide
  Mismatch hsa-miR-670-3p MIMAT0026640
tcctgaatgatcatgaggaaa

SEQ ID NO: 6935 - DNA, 22 bp, Artificial Sequence
  Synthetic oligonucleotide
  Mismatch hsa-miR-1236-3p MIMAT0005591
ctggagagacatagggaagagg

SEQ ID NO: 6936 - DNA, 21 bp, Artificial Sequence
  Synthetic oligonucleotide
  Mismatch hsa-miR-3912-5p MIMAT0027036
actaacccattttatggacat

SEQ ID NO: 6937 - DNA, 22 bp, Artificial Sequence
  Synthetic oligonucleotide
  Mismatch hsa-miR-3686 MIMAT0018114
tcatttacttttccttacagat

SEQ ID NO: 6938 - DNA, 21 bp, Artificial Sequence
  Synthetic oligonucleotide
  Mismatch hsa-miR-4783-5p MIMAT0019946
agcccgggagtcgggcgcgcc

SEQ ID NO: 6939 - DNA, 21 bp, Artificial Sequence
  Synthetic oligonucleotide
  Mismatch hsa-miR-660-3p MIMAT0022711
taatccatgcttacaggaggt

SEQ ID NO: 6940 - DNA, 21 bp, Artificial Sequence
  Synthetic oligonucleotide
  Mismatch hsa-miR-3655 MIMAT0018075
agcaacaccgttgcgacaagc

SEQ ID NO: 6941 - DNA, 21 bp, Artificial Sequence
  Synthetic oligonucleotide
  Mismatch hsa-miR-4720-3p MIMAT0019834
atacttggtattacttaagca

SEQ ID NO: 6942 - DNA, 21 bp, Artificial Sequence
  Synthetic oligonucleotide
  Mismatch hsa-miR-1202 MIMAT0005865
ctcccccactatagctggcac

SEQ ID NO: 6943 - DNA, 22 bp, Artificial Sequence
  Synthetic oligonucleotide
  Mismatch hsa-miR-3160-5p MIMAT0019212
ggagagctgagtttagaaagcc

SEQ ID NO: 6944 - DNA, 21 bp, Artificial Sequence
  Synthetic oligonucleotide
  Mismatch hsa-miR-765 MIMAT0003945
catcaccttctctctcctcca

SEQ ID NO: 6945 - DNA, 21 bp, Artificial Sequence
  Synthetic oligonucleotide
  Mismatch hsa-miR-628-3p MIMAT0003297
tcgactgccatccttactaga

SEQ ID NO: 6946 - DNA, 24 bp, Artificial Sequence
  Synthetic oligonucleotide
  Mismatch hsa-miR-3687 MIMAT0018115
acgtcgcacgaacatctgtccggg

SEQ ID NO: 6947 - DNA, 22 bp, Artificial Sequence
  Synthetic oligonucleotide
  Mismatch hsa-miR-532-5p MIMAT0002888
acggtcctacatccaaggcatg

SEQ ID NO: 6948 - DNA, 23 bp, Artificial Sequence
  Synthetic oligonucleotide
  Mismatch hsa-miR-3131 MIMAT0014996
aaggcccttccattagtcctcga

SEQ ID NO: 6949 - DNA, 21 bp, Artificial Sequence
  Synthetic oligonucleotide
  Mismatch hsa-miR-296-5p MIMAT0000690
acaggattgaaagggggccct

SEQ ID NO: 6950 - DNA, 22 bp, Artificial Sequence
  Synthetic oligonucleotide
  Mismatch hsa-miR-378a-5p MIMAT0000731
acacaggacctaaagtcaggag

SEQ ID NO: 6951 - DNA, 21 bp, Artificial Sequence
  Synthetic oligonucleotide
  Mismatch hsa-miR-6769a-3p MIMAT0027439
ctggagagcaatgaggggctc

SEQ ID NO: 6952 - DNA, 20 bp, Artificial Sequence
  Synthetic oligonucleotide
  Mismatch hsa-miR-6802-5p MIMAT0027504
gcttcaagcttcccacctag

SEQ ID NO: 6953 - DNA, 23 bp, Artificial Sequence
  Synthetic oligonucleotide
  Mismatch hsa-miR-1911-5p MIMAT0007885
cccaacagacataacggtactca

SEQ ID NO: 6954 - DNA, 19 bp, Artificial Sequence
  Synthetic oligonucleotide
  Mismatch hsa-miR-6128 MIMAT0024611
ttttgactttaattccagt

SEQ ID NO: 6955 - DNA, 23 bp, Artificial Sequence
  Synthetic oligonucleotide
  Mismatch hsa-miR-20a-5p MIMAT0000075
ctacctgcactactagcacttta

SEQ ID NO: 6956 - DNA, 22 bp, Artificial Sequence
  Synthetic oligonucleotide
  Mismatch hsa-miR-5586-5p MIMAT0022287
gcatatagtaattagctggata

SEQ ID NO: 6957 - DNA, 20 bp, Artificial Sequence
  Synthetic oligonucleotide
  Mismatch hsa-miR-4790-5p MIMAT0019961
aacatgaataataaagcgat

SEQ ID NO: 6958 - DNA, 21 bp, Artificial Sequence
  Synthetic oligonucleotide
  Mismatch hsa-miR-188-3p MIMAT0004613
tgcaaaccctatatgtgggag

SEQ ID NO: 6959 - DNA, 21 bp, Artificial Sequence
  Synthetic oligonucleotide
  Mismatch hsa-miR-21-3p MIMAT0004494
acagcccatcatctggtgttg

SEQ ID NO: 6960 - DNA, 22 bp, Artificial Sequence
  Synthetic oligonucleotide
  Mismatch hsa-miR-4654 MIMAT0019720
ccagatgcctcttgatcccaca

SEQ ID NO: 6961 - DNA, 23 bp, Artificial Sequence
  Synthetic oligonucleotide
  Mismatch hsa-miR-6859-5p MIMAT0027618
tgtcctgagccctcgttcctctc

SEQ ID NO: 6962 - DNA, 22 bp, Artificial Sequence
  Synthetic oligonucleotide
  Mismatch hsa-miR-550b-2-5p MIMAT0022737
tgtcttactcctccaggcacat

SEQ ID NO: 6963 - DNA, 25 bp, Artificial Sequence
  Synthetic oligonucleotide
  Mismatch hsa-miR-6782-5p MIMAT0027464
acacccctgaattcttccaccccta

SEQ ID NO: 6964 - DNA, 22 bp, Artificial Sequence
  Synthetic oligonucleotide
  Mismatch hsa-miR-4527 MIMAT0019066
acagtcatctccctgcagacca

SEQ ID NO: 6965 - DNA, 21 bp, Artificial Sequence
  Synthetic oligonucleotide
  Mismatch hsa-miR-2117 MIMAT0011162
ctgtccttggttaagagaaca

SEQ ID NO: 6966 - DNA, 22 bp, Artificial Sequence
  Synthetic oligonucleotide
  Mismatch hsa-miR-2355-3p MIMAT0017950
atctccaaacaataaggacaat

SEQ ID NO: 6967 - DNA, 22 bp, Artificial Sequence
  Synthetic oligonucleotide
  Mismatch hsa-miR-148b-3p MIMAT0000759
acaaagttctgcaatgcactga

SEQ ID NO: 6968 - DNA, 21 bp, Artificial Sequence
  Synthetic oligonucleotide
  Mismatch hsa-miR-6864-3p MIMAT0027629
ctgaagggagtaaagtctcac

SEQ ID NO: 6969 - DNA, 21 bp, Artificial Sequence
  Synthetic oligonucleotide
  Mismatch hsa-miR-590-3p MIMAT0004801
actagcttatttataaaatta

SEQ ID NO: 6970 - DNA, 22 bp, Artificial Sequence
  Synthetic oligonucleotide
  Mismatch hsa-miR-100-5p MIMAT0000098
cacaagttcggtcctacgggtt

SEQ ID NO: 6971 - DNA, 23 bp, Artificial Sequence
  Synthetic oligonucleotide
  Mismatch hsa-miR-548u MIMAT0015013
cgcaaaagtaatcacagtctttg

SEQ ID NO: 6972 - DNA, 21 bp, Artificial Sequence
  Synthetic oligonucleotide
  Mismatch hsa-miR-5589-5p MIMAT0022297
actgcacaagtacacccagcc

SEQ ID NO: 6973 - DNA, 23 bp, Artificial Sequence
  Synthetic oligonucleotide
  Mismatch hsa-miR-6837-3p MIMAT0027577
ctgcagcagagtttcagtgaagg

SEQ ID NO: 6974 - DNA, 25 bp, Artificial Sequence
  Synthetic oligonucleotide
  Mismatch hsa-miR-6774-5p MIMAT0027448
catacagggtcccttttgcccaagt

SEQ ID NO: 6975 - DNA, 18 bp, Artificial Sequence
  Synthetic oligonucleotide
  Mismatch hsa-miR-4263 MIMAT0016898
ggccaagatacttagaat

SEQ ID NO: 6976 - DNA, 24 bp, Artificial Sequence
  Synthetic oligonucleotide
  Mismatch hsa-miR-8074 MIMAT0031001
gagtacatgccagcttcgccatag

SEQ ID NO: 6977 - DNA, 21 bp, Artificial Sequence
  Synthetic oligonucleotide
  Mismatch hsa-miR-6808-3p MIMAT0027517
ctgcaggaacaatggtcacac

SEQ ID NO: 6978 - DNA, 21 bp, Artificial Sequence
  Synthetic oligonucleotide
  Mismatch hsa-miR-4666a-5p MIMAT0019741
ggcatacaattcgacatgtat

SEQ ID NO: 6979 - DNA, 23 bp, Artificial Sequence
  Synthetic oligonucleotide
  Mismatch hsa-miR-6743-3p MIMAT0027388
tgtgggcagggaatagagcggct

SEQ ID NO: 6980 - DNA, 21 bp, Artificial Sequence
  Synthetic oligonucleotide
  Mismatch hsa-miR-511-5p MIMAT0002808
tgactgcagaataaaagacac

SEQ ID NO: 6981 - DNA, 23 bp, Artificial Sequence
  Synthetic oligonucleotide
  Mismatch hsa-miR-4632-5p MIMAT0022977
tccgccacacccttgctgccctc

SEQ ID NO: 6982 - DNA, 23 bp, Artificial Sequence
  Synthetic oligonucleotide
  Mismatch hsa-miR-301a-3p MIMAT0000688
gctttgacaatatcattgcactg

SEQ ID NO: 6983 - DNA, 22 bp, Artificial Sequence
  Synthetic oligonucleotide
  Mismatch hsa-miR-1200 MIMAT0005863
gaggctcagaacagctcaggag

SEQ ID NO: 6984 - DNA, 23 bp, Artificial Sequence
  Synthetic oligonucleotide
  Mismatch hsa-miR-3199 MIMAT0015084
aactttctcctatagcagtccct

SEQ ID NO: 6985 - DNA, 21 bp, Artificial Sequence
  Synthetic oligonucleotide
  Mismatch hsa-miR-152-3p MIMAT0000438
ccaagttctgctatgcactga

SEQ ID NO: 6986 - DNA, 22 bp, Artificial Sequence
  Synthetic oligonucleotide
  Mismatch hsa-miR-361-5p MIMAT0000703
gtacccctggaatttctgataa

SEQ ID NO: 6987 - DNA, 21 bp, Artificial Sequence
  Synthetic oligonucleotide
  Mismatch hsa-miR-1199-3p MIMAT0031120
gcaggttgagttccggccgca

SEQ ID NO: 6988 - DNA, 21 bp, Artificial Sequence
  Synthetic oligonucleotide
  Mismatch hsa-miR-6751-3p MIMAT0027403
ctggagagagtaaggctcagt

SEQ ID NO: 6989 - DNA, 22 bp, Artificial Sequence
  Synthetic oligonucleotide
  Mismatch hsa-miR-6757-3p MIMAT0027415
tggggatagcatagccagtgtt

SEQ ID NO: 6990 - DNA, 22 bp, Artificial Sequence
  Synthetic oligonucleotide
  Mismatch hsa-miR-6871-5p MIMAT0027642
gcaaccaccccatactcccatg

SEQ ID NO: 6991 - DNA, 21 bp, Artificial Sequence
  Synthetic oligonucleotide
  Mismatch hsa-miR-656-3p MIMAT0003332
agaggttgaccatataatatt

SEQ ID NO: 6992 - DNA, 23 bp, Artificial Sequence
  Synthetic oligonucleotide
  Mismatch hsa-miR-4728-5p MIMAT0019849
tgcttgctgccttccccctccca

SEQ ID NO: 6993 - DNA, 22 bp, Artificial Sequence
  Synthetic oligonucleotide
  Mismatch hsa-miR-23c MIMAT0018000
gggtaatcactaacaatgtgat

SEQ ID NO: 6994 - DNA, 21 bp, Artificial Sequence
  Synthetic oligonucleotide
  Mismatch hsa-miR-4717-3p MIMAT0019830
aggccacagcttcccatgtgt

SEQ ID NO: 6995 - DNA, 22 bp, Artificial Sequence
  Synthetic oligonucleotide
  Mismatch hsa-miR-517c-3p MIMAT0002866
acactctaaaaaaatgcacgat

SEQ ID NO: 6996 - DNA, 22 bp, Artificial Sequence
  Synthetic oligonucleotide
  Mismatch hsa-miR-520c-3p MIMAT0002846
accctctaaaaaaaagcacttt

SEQ ID NO: 6997 - DNA, 24 bp, Artificial Sequence
  Synthetic oligonucleotide
  Mismatch hsa-miR-6854-5p MIMAT0027608
tcagcagttctcattcctgagctt

SEQ ID NO: 6998 - DNA, 22 bp, Artificial Sequence
  Synthetic oligonucleotide
  Mismatch hsa-miR-6849-3p MIMAT0027599
ctggaggtggattcaggctggt

SEQ ID NO: 6999 - DNA, 16 bp, Artificial Sequence
  Synthetic oligonucleotide
  Mismatch hsa-miR-4310 MIMAT0016862
gggactcgaatgctgc

SEQ ID NO: 7000 - DNA, 21 bp, Artificial Sequence
  Synthetic oligonucleotide
  Mismatch hsa-miR-5591-5p MIMAT0022301
atacccatagtctagctccca

SEQ ID NO: 7001 - DNA, 22 bp, Artificial Sequence
  Synthetic oligonucleotide
  Mismatch hsa-miR-509-3p MIMAT0002881
ctacccacagatataccaatca

SEQ ID NO: 7002 - DNA, 21 bp, Artificial Sequence
  Synthetic oligonucleotide
  Mismatch hsa-miR-4277 MIMAT0016908
gtgtactgtgtccagaactgc

SEQ ID NO: 7003 - DNA, 22 bp, Artificial Sequence
  Synthetic oligonucleotide
  Mismatch hsa-miR-4722-3p MIMAT0019837
ctgcagggaggcactggcaggt

SEQ ID NO: 7004 - DNA, 22 bp, Artificial Sequence
  Synthetic oligonucleotide
  Mismatch hsa-miR-6729-5p MIMAT0027359
gccgctcagccatcctcgccca

SEQ ID NO: 7005 - DNA, 22 bp, Artificial Sequence
  Synthetic oligonucleotide
  Mismatch hsa-miR-4496 MIMAT0019031
ccctctcagctctagtttcctc

SEQ ID NO: 7006 - DNA, 22 bp, Artificial Sequence
  Synthetic oligonucleotide
  Mismatch hsa-miR-4764-3p MIMAT0019915
ccatgggtgtgttaggagttaa

SEQ ID NO: 7007 - DNA, 22 bp, Artificial Sequence
  Synthetic oligonucleotide
  Mismatch hsa-miR-4782-5p MIMAT0019944
ttgattgtctttttatccagaa

SEQ ID NO: 7008 - DNA, 22 bp, Artificial Sequence
  Synthetic oligonucleotide
  Mismatch hsa-miR-708-3p MIMAT0004927
ctagaagctcattgtctagttg

SEQ ID NO: 7009 - DNA, 22 bp, Artificial Sequence
  Synthetic oligonucleotide
  Mismatch hsa-miR-1323 MIMAT0005795
agaaaatgccctccagttttga

SEQ ID NO: 7010 - DNA, 22 bp, Artificial Sequence
  Synthetic oligonucleotide
  Mismatch hsa-let-7i-5p MIMAT0000415
aacagcacaaatcactacctca

SEQ ID NO: 7011 - DNA, 20 bp, Artificial Sequence
  Synthetic oligonucleotide
  Mismatch hsa-miR-384 MIMAT0001075
tatgaacaacctctaggaat

SEQ ID NO: 7012 - DNA, 18 bp, Artificial Sequence
  Synthetic oligonucleotide
  Mismatch hsa-miR-4292 MIMAT0016919
ccaaggctagcccagggg

SEQ ID NO: 7013 - DNA, 21 bp, Artificial Sequence
  Synthetic oligonucleotide
  Mismatch hsa-miR-1273g-3p MIMAT0022742
ctcaggctggtatgcagtggt

SEQ ID NO: 7014 - DNA, 22 bp, Artificial Sequence
  Synthetic oligonucleotide
  Mismatch hsa-miR-4699-3p MIMAT0019795
ggagaagattgttgagtaaatt

SEQ ID NO: 7015 - DNA, 20 bp, Artificial Sequence
  Synthetic oligonucleotide
  Mismatch hsa-miR-500b-3p MIMAT0027032
cagaatcctcacctgggtgc

SEQ ID NO: 7016 - DNA, 22 bp, Artificial Sequence
  Synthetic oligonucleotide
  Mismatch hsa-miR-1252-5p MIMAT0005944
taaatgaattctttttccttct

SEQ ID NO: 7017 - DNA, 22 bp, Artificial Sequence
  Synthetic oligonucleotide
  Mismatch hsa-miR-4802-5p MIMAT0019981
aacatggtctaatacctccata

SEQ ID NO: 7018 - DNA, 22 bp, Artificial Sequence
  Synthetic oligonucleotide
  Mismatch hsa-miR-4509 MIMAT0019046
aaaaccttctacttcctttagt

SEQ ID NO: 7019 - DNA, 19 bp, Artificial Sequence
  Synthetic oligonucleotide
  Mismatch hsa-miR-6090 MIMAT0023715
gccccgcctttcgctcccc

SEQ ID NO: 7020 - DNA, 22 bp, Artificial Sequence
  Synthetic oligonucleotide
  Mismatch hsa-miR-654-3p MIMAT0004814
aaggtgatggtttgcagacata

SEQ ID NO: 7021 - DNA, 22 bp, Artificial Sequence
  Synthetic oligonucleotide
  Mismatch hsa-miR-4679 MIMAT0019763
agcaaagaatccttatcacaga

SEQ ID NO: 7022 - DNA, 22 bp, Artificial Sequence
  Synthetic oligonucleotide
  Mismatch hsa-miR-429 MIMAT0001536
acggttttacctaacagtatta

SEQ ID NO: 7023 - DNA, 22 bp, Artificial Sequence
  Synthetic oligonucleotide
  Mismatch hsa-miR-584-3p MIMAT0022708
agcctggttggtttggaactga

SEQ ID NO: 7024 - DNA, 23 bp, Artificial Sequence
  Synthetic oligonucleotide
  Mismatch hsa-miR-508-3p MIMAT0002880
tctactccaaaaaactacaatca

SEQ ID NO: 7025 - DNA, 22 bp, Artificial Sequence
  Synthetic oligonucleotide
  Mismatch hsa-miR-4655-5p MIMAT0019721
cgaccctctgctttccccggtg

SEQ ID NO: 7026 - DNA, 22 bp, Artificial Sequence
  Synthetic oligonucleotide
  Mismatch hsa-miR-6808-5p MIMAT0027516
catggtcccactcccctgcctg

SEQ ID NO: 7027 - DNA, 21 bp, Artificial Sequence
  Synthetic oligonucleotide
  Mismatch hsa-miR-4762-5p MIMAT0019910
aggcttctgactaagatttgg

SEQ ID NO: 7028 - DNA, 21 bp, Artificial Sequence
  Synthetic oligonucleotide
  Mismatch hsa-miR-6837-5p MIMAT0027576
acattccctgtcggccctggt

SEQ ID NO: 7029 - DNA, 22 bp, Artificial Sequence
  Synthetic oligonucleotide
  Mismatch hsa-miR-200b-5p MIMAT0004571
tccaatgctgcttagtaagatg

SEQ ID NO: 7030 - DNA, 20 bp, Artificial Sequence
  Synthetic oligonucleotide
  Mismatch hsa-miR-6801-3p MIMAT0027503
ggccagtgaacggcaggggt

SEQ ID NO: 7031 - DNA, 22 bp, Artificial Sequence
  Synthetic oligonucleotide
  Mismatch hsa-miR-548d-5p MIMAT0004812
ggcaaaaaccattattactttt

SEQ ID NO: 7032 - DNA, 22 bp, Artificial Sequence
  Synthetic oligonucleotide
  Mismatch hsa-miR-3157-3p MIMAT0019210
agcttcagctaatctagggcag

SEQ ID NO: 7033 - DNA, 23 bp, Artificial Sequence
  Synthetic oligonucleotide
  Mismatch hsa-miR-324-5p MIMAT0000761
acaccaatgcccctggggatgcg

SEQ ID NO: 7034 - DNA, 22 bp, Artificial Sequence
  Synthetic oligonucleotide
  Mismatch hsa-miR-26a-1-3p MIMAT0004499
cgtgcaagtaattaagaatagg

SEQ ID NO: 7035 - DNA, 20 bp, Artificial Sequence
  Synthetic oligonucleotide
  Mismatch hsa-miR-3713 MIMAT0018164
accatccccttacggatacc

SEQ ID NO: 7036 - DNA, 21 bp, Artificial Sequence
  Synthetic oligonucleotide
  Mismatch hsa-miR-4280 MIMAT0016911
gctctgctcaatactacactc

SEQ ID NO: 7037 - DNA, 22 bp, Artificial Sequence
  Synthetic oligonucleotide
  Mismatch hsa-miR-6743-5p MIMAT0027387
gggccacccgtttctgcccctt

SEQ ID NO: 7038 - DNA, 25 bp, Artificial Sequence
  Synthetic oligonucleotide
  Mismatch hsa-miR-6855-5p MIMAT0027610
gcaatgtctgcaccttaaaccccaa

SEQ ID NO: 7039 - DNA, 22 bp, Artificial Sequence
  Synthetic oligonucleotide
  Mismatch hsa-miR-1294 MIMAT0005884
agacaacaatgttaacctcaca

SEQ ID NO: 7040 - DNA, 22 bp, Artificial Sequence
  Synthetic oligonucleotide
  Mismatch hsa-miR-5696 MIMAT0022489
ggcatcagactttttaaatgag

SEQ ID NO: 7041 - DNA, 24 bp, Artificial Sequence
  Synthetic oligonucleotide
  Mismatch hsa-miR-7158-5p MIMAT0028226
ggctgcaggaccaatgattgagcc

SEQ ID NO: 7042 - DNA, 25 bp, Artificial Sequence
  Synthetic oligonucleotide
  Mismatch hsa-miR-548aa MIMAT0018447
tggtgcaaaagtaaccgtggttttt

SEQ ID NO: 7043 - DNA, 22 bp, Artificial Sequence
  Synthetic oligonucleotide
  Mismatch hsa-miR-3157-5p MIMAT0015031
agactgcactaatctggctgaa

SEQ ID NO: 7044 - DNA, 22 bp, Artificial Sequence
  Synthetic oligonucleotide
  Mismatch hsa-miR-154-3p MIMAT0000453
aataggtcaactatgtatgatt

SEQ ID NO: 7045 - DNA, 22 bp, Artificial Sequence
  Synthetic oligonucleotide
  Mismatch hsa-miR-122-3p MIMAT0004590
tatttagtgtgtcaatggcgtt

SEQ ID NO: 7046 - DNA, 23 bp, Artificial Sequence
  Synthetic oligonucleotide
  Mismatch hsa-miR-1270 MIMAT0005924
acacagctcttctttatctccag

SEQ ID NO: 7047 - DNA, 23 bp, Artificial Sequence
  Synthetic oligonucleotide
  Mismatch hsa-miR-769-3p MIMAT0003887
aaccaagaccccaaagatcccag

SEQ ID NO: 7048 - DNA, 17 bp, Artificial Sequence
  Synthetic oligonucleotide
  Mismatch hsa-miR-3168 MIMAT0015043
gtctgatcgtagaactc

SEQ ID NO: 7049 - DNA, 21 bp, Artificial Sequence
  Synthetic oligonucleotide
  Mismatch hsa-miR-143-3p MIMAT0000435
gagctacagtatttcatctca

SEQ ID NO: 7050 - DNA, 23 bp, Artificial Sequence
  Synthetic oligonucleotide
  Mismatch hsa-miR-6874-5p MIMAT0027648
gcctgatctggtctcagctccat

SEQ ID NO: 7051 - DNA, 18 bp, Artificial Sequence
  Synthetic oligonucleotide
  Mismatch hsa-miR-516b-3p MIMAT0002860
accctctataaggaagca

SEQ ID NO: 7052 - DNA, 23 bp, Artificial Sequence
  Synthetic oligonucleotide
  Mismatch hsa-miR-10b-5p MIMAT0000254
cacaaattcggtcttacagggta

SEQ ID NO: 7053 - DNA, 22 bp, Artificial Sequence
  Synthetic oligonucleotide
  Mismatch hsa-miR-4677-5p MIMAT0019760
tggctgaaagattaaagaacaa

SEQ ID NO: 7054 - DNA, 23 bp, Artificial Sequence
  Synthetic oligonucleotide
  Mismatch hsa-miR-7705 MIMAT0030020
cagaactgacatcttgagctatt

SEQ ID NO: 7055 - DNA, 22 bp, Artificial Sequence
  Synthetic oligonucleotide
  Mismatch hsa-miR-6847-3p MIMAT0027595
gaagaggacagttacatgagcc

SEQ ID NO: 7056 - DNA, 22 bp, Artificial Sequence
  Synthetic oligonucleotide
  Mismatch hsa-miR-6755-5p MIMAT0027410
aacgttgtcagcatctacccta

SEQ ID NO: 7057 - DNA, 22 bp, Artificial Sequence
  Synthetic oligonucleotide
  Mismatch hsa-miR-512-3p MIMAT0002823
gacctcagctacaacagcactt

SEQ ID NO: 7058 - DNA, 22 bp, Artificial Sequence
  Synthetic oligonucleotide
  Mismatch hsa-miR-153-3p MIMAT0000439
gatcacttttgcaactatgcaa

SEQ ID NO: 7059 - DNA, 20 bp, Artificial Sequence
  Synthetic oligonucleotide
  Mismatch hsa-miR-4454 MIMAT0018976
tggtgccgtatctcggatcc

SEQ ID NO: 7060 - DNA, 20 bp, Artificial Sequence
  Synthetic oligonucleotide
  Mismatch hsa-miR-8064 MIMAT0030991
gtccgctcgtccagtgtgct

SEQ ID NO: 7061 - DNA, 22 bp, Artificial Sequence
  Synthetic oligonucleotide
  Mismatch hsa-miR-7110-3p MIMAT0028118
ctgcagggaagcaggagagaga

SEQ ID NO: 7062 - DNA, 23 bp, Artificial Sequence
  Synthetic oligonucleotide
  Mismatch hsa-miR-423-3p MIMAT0001340
actgaggggcctttgaccgagct

SEQ ID NO: 7063 - DNA, 22 bp, Artificial Sequence
  Synthetic oligonucleotide
  Mismatch hsa-miR-331-5p MIMAT0004700
ggatccctgggttcatacctag

SEQ ID NO: 7064 - DNA, 21 bp, Artificial Sequence
  Synthetic oligonucleotide
  Mismatch hsa-miR-190a-3p MIMAT0026482
aggaatatgtccgatatatag

SEQ ID NO: 7065 - DNA, 21 bp, Artificial Sequence
  Synthetic oligonucleotide
  Mismatch hsa-miR-610 MIMAT0003278
tcccagcacatttttagctca

SEQ ID NO: 7066 - DNA, 22 bp, Artificial Sequence
  Synthetic oligonucleotide
  Mismatch hsa-miR-198 MIMAT0000228
gaacctatctcttctctggacc

SEQ ID NO: 7067 - DNA, 21 bp, Artificial Sequence
  Synthetic oligonucleotide
  Mismatch hsa-miR-4536-5p MIMAT0019078
atcgtgcatacttctaccaca

SEQ ID NO: 7068 - DNA, 22 bp, Artificial Sequence
  Synthetic oligonucleotide
  Mismatch hsa-miR-4760-5p MIMAT0019906
ctaacttcatgcccaatctaaa

SEQ ID NO: 7069 - DNA, 22 bp, Artificial Sequence
  Synthetic oligonucleotide
  Mismatch hsa-miR-3924 MIMAT0018199
agtagcagtcatttatacatat

SEQ ID NO: 7070 - DNA, 20 bp, Artificial Sequence
  Synthetic oligonucleotide
  Mismatch hsa-miR-5692b MIMAT0022497
acacctactacgatattatt

SEQ ID NO: 7071 - DNA, 22 bp, Artificial Sequence
  Synthetic oligonucleotide
  Mismatch hsa-miR-6742-5p MIMAT0027385
aacagctgggtttcaccccact

SEQ ID NO: 7072 - DNA, 25 bp, Artificial Sequence
  Synthetic oligonucleotide
  Mismatch hsa-miR-612 MIMAT0003280
aaggagctcagaagttctgcccagc

SEQ ID NO: 7073 - DNA, 23 bp, Artificial Sequence
  Synthetic oligonucleotide
  Mismatch hsa-miR-935 MIMAT0004978
gcggtagcggaaatggtaactgg

SEQ ID NO: 7074 - DNA, 24 bp, Artificial Sequence
  Synthetic oligonucleotide
  Mismatch hsa-miR-8089 MIMAT0031016
ctgccccaatccctcgtccccagg

SEQ ID NO: 7075 - DNA, 21 bp, Artificial Sequence
  Synthetic oligonucleotide
  Mismatch hsa-miR-6774-3p MIMAT0027449
ctgtggacaaatgggacacga

SEQ ID NO: 7076 - DNA, 22 bp, Artificial Sequence
  Synthetic oligonucleotide
  Mismatch hsa-miR-4503 MIMAT0019039
taaattctattctctgcttaaa

SEQ ID NO: 7077 - DNA, 22 bp, Artificial Sequence
  Synthetic oligonucleotide
  Mismatch hsa-miR-762 MIMAT0010313
gctcggccccgatcccagcccc

SEQ ID NO: 7078 - DNA, 22 bp, Artificial Sequence
  Synthetic oligonucleotide
  Mismatch hsa-miR-150-3p MIMAT0004610
ctgtcccccagatctgtaccag

SEQ ID NO: 7079 - DNA, 22 bp, Artificial Sequence
  Synthetic oligonucleotide
  Mismatch hsa-miR-548aq-5p MIMAT0022263
ggcaaaaacagttattactttc

SEQ ID NO: 7080 - DNA, 20 bp, Artificial Sequence
  Synthetic oligonucleotide
  Mismatch hsa-miR-4999-3p MIMAT0021018
actgtattgctaggtagtga

SEQ ID NO: 7081 - DNA, 21 bp, Artificial Sequence
  Synthetic oligonucleotide
  Mismatch hsa-miR-3130-5p MIMAT0014995
ggctgcaccgatgactgggta

SEQ ID NO: 7082 - DNA, 22 bp, Artificial Sequence
  Synthetic oligonucleotide
  Mismatch hsa-miR-6883-3p MIMAT0027667
ctgaggagagtatgatagggaa

SEQ ID NO: 7083 - DNA, 22 bp, Artificial Sequence
  Synthetic oligonucleotide
  Mismatch hsa-miR-497-3p MIMAT0004768
tctaacaccactatgtggtttg

SEQ ID NO: 7084 - DNA, 22 bp, Artificial Sequence
  Synthetic oligonucleotide
  Mismatch hsa-miR-3689c MIMAT0019007
accacaatatcttacctcccag

SEQ ID NO: 7085 - DNA, 22 bp, Artificial Sequence
  Synthetic oligonucleotide
  Mismatch hsa-miR-8082 MIMAT0031009
cagagtattccttgctccatca

SEQ ID NO: 7086 - DNA, 22 bp, Artificial Sequence
  Synthetic oligonucleotide
  Mismatch hsa-miR-548bb-3p MIMAT0035704
gcaaaagtaaccttggtttttg

SEQ ID NO: 7087 - DNA, 22 bp, Artificial Sequence
  Synthetic oligonucleotide
  Mismatch hsa-miR-6818-5p MIMAT0027536
gatgctctctgctctcacacaa

SEQ ID NO: 7088 - DNA, 23 bp, Artificial Sequence
  Synthetic oligonucleotide
  Mismatch hsa-miR-6506-5p MIMAT0025468
accatattcagtatcatcccagt

SEQ ID NO: 7089 - DNA, 18 bp, Artificial Sequence
  Synthetic oligonucleotide
  Mismatch hsa-miR-4315 MIMAT0016866
gtccagcctagaaagcgg

SEQ ID NO: 7090 - DNA, 21 bp, Artificial Sequence
  Synthetic oligonucleotide
  Mismatch hsa-miR-676-3p MIMAT0018204
aactcaacaattttaggacag

SEQ ID NO: 7091 - DNA, 22 bp, Artificial Sequence
  Synthetic oligonucleotide
  Mismatch hsa-miR-6508-3p MIMAT0025473
agttctagaaacacatggccca

SEQ ID NO: 7092 - DNA, 19 bp, Artificial Sequence
  Synthetic oligonucleotide
  Mismatch hsa-miR-3181 MIMAT0015061
ccggcgccatgggcccgat

SEQ ID NO: 7093 - DNA, 22 bp, Artificial Sequence
  Synthetic oligonucleotide
  Mismatch hsa-miR-3927-3p MIMAT0018202
atgcctatcaatcatctacctg

SEQ ID NO: 7094 - DNA, 22 bp, Artificial Sequence
  Synthetic oligonucleotide
  Mismatch hsa-miR-5193 MIMAT0021124
actgggatgagacagaggagga

SEQ ID NO: 7095 - DNA, 22 bp, Artificial Sequence
  Synthetic oligonucleotide
  Mismatch hsa-miR-7843-5p MIMAT0030411
tcaggaagctgattctgccctc

SEQ ID NO: 7096 - DNA, 22 bp, Artificial Sequence
  Synthetic oligonucleotide
  Mismatch hsa-miR-6781-3p MIMAT0027463
ctgaggccgtgataaagaggca

SEQ ID NO: 7097 - DNA, 22 bp, Artificial Sequence
  Synthetic oligonucleotide
  Mismatch hsa-miR-376b-3p MIMAT0002172
aacatggatttctctctatgat

SEQ ID NO: 7098 - DNA, 22 bp, Artificial Sequence
  Synthetic oligonucleotide
  Mismatch hsa-miR-4259 MIMAT0016880
tcctgaccccttaacccaactg

SEQ ID NO: 7099 - DNA, 19 bp, Artificial Sequence
  Synthetic oligonucleotide
  Mismatch hsa-miR-566 MIMAT0003230
gttgggatttcaggcgccc

SEQ ID NO: 7100 - DNA, 20 bp, Artificial Sequence
  Synthetic oligonucleotide
  Mismatch hsa-miR-371a-5p MIMAT0004687
agtgcccccttagtttgagt

SEQ ID NO: 7101 - DNA, 22 bp, Artificial Sequence
  Synthetic oligonucleotide
  Mismatch hsa-miR-548e-5p MIMAT0026736
gcaaaaaccgcatttgcttttg

SEQ ID NO: 7102 - DNA, 22 bp, Artificial Sequence
  Synthetic oligonucleotide
  Mismatch hsa-miR-651-5p MIMAT0003321
caaaagtcaagtctatcctaaa

SEQ ID NO: 7103 - DNA, 22 bp, Artificial Sequence
  Synthetic oligonucleotide
  Mismatch hsa-miR-422a MIMAT0001339
gccttctgacctcaagtccagt

SEQ ID NO: 7104 - DNA, 22 bp, Artificial Sequence
  Synthetic oligonucleotide
  Mismatch hsa-miR-4642 MIMAT0019702
agccaccagggatcgatgccat

SEQ ID NO: 7105 - DNA, 21 bp, Artificial Sequence
  Synthetic oligonucleotide
  Mismatch hsa-miR-4724-3p MIMAT0019842
actagctgaattagaaggtac

SEQ ID NO: 7106 - DNA, 21 bp, Artificial Sequence
  Synthetic oligonucleotide
  Mismatch hsa-miR-7160-3p MIMAT0028231
tctgctaaagttagggccctg

SEQ ID NO: 7107 - DNA, 19 bp, Artificial Sequence
  Synthetic oligonucleotide
  Mismatch hsa-miR-6744-5p MIMAT0027389
aggcctcctttgtcatcca

SEQ ID NO: 7108 - DNA, 22 bp, Artificial Sequence
  Synthetic oligonucleotide
  Mismatch hsa-miR-4524a-3p MIMAT0019063
atagcagcatatacctgtctca

SEQ ID NO: 7109 - DNA, 22 bp, Artificial Sequence
  Synthetic oligonucleotide
  Mismatch hsa-miR-873-3p MIMAT0022717
tcccgggaacttttcagtctcc

SEQ ID NO: 7110 - DNA, 22 bp, Artificial Sequence
  Synthetic oligonucleotide
  Mismatch hsa-miR-362-3p MIMAT0004683
tgaatccttgatcaggtgtgtt

SEQ ID NO: 7111 - DNA, 23 bp, Artificial Sequence
  Synthetic oligonucleotide
  Mismatch hsa-miR-4758-3p MIMAT0019904
gagggtggtcagttggtggggca

SEQ ID NO: 7112 - DNA, 22 bp, Artificial Sequence
  Synthetic oligonucleotide
  Mismatch hsa-miR-1263 MIMAT0005915
actcagtatgcttgggtaccat

SEQ ID NO: 7113 - DNA, 22 bp, Artificial Sequence
  Synthetic oligonucleotide
  Mismatch hsa-miR-6512-3p MIMAT0025481
cctaccattagttgggctggaa

SEQ ID NO: 7114 - DNA, 20 bp, Artificial Sequence
  Synthetic oligonucleotide
  Mismatch hsa-miR-6073 MIMAT0023698
gtagctgatttctcactacc

SEQ ID NO: 7115 - DNA, 20 bp, Artificial Sequence
  Synthetic oligonucleotide
  Mismatch hsa-miR-670-5p MIMAT0010357
caccacatattctcagggac

SEQ ID NO: 7116 - DNA, 21 bp, Artificial Sequence
  Synthetic oligonucleotide
  Mismatch hsa-miR-1257 MIMAT0005908
ggtcagaacctttcattcact

SEQ ID NO: 7117 - DNA, 22 bp, Artificial Sequence
  Synthetic oligonucleotide
  Mismatch hsa-miR-3911 MIMAT0018185
tgcctcctccaaaatccacaca

SEQ ID NO: 7118 - DNA, 20 bp, Artificial Sequence
  Synthetic oligonucleotide
  Mismatch hsa-miR-4429 MIMAT0018944
cgcctctcaatccagctttt

SEQ ID NO: 7119 - DNA, 23 bp, Artificial Sequence
  Synthetic oligonucleotide
  Mismatch hsa-miR-4711-5p MIMAT0019816
ctcatgtcttctaacctgatgca

SEQ ID NO: 7120 - DNA, 22 bp, Artificial Sequence
  Synthetic oligonucleotide
  Mismatch hsa-miR-3646 MIMAT0018065
tgggctgggcttttttcatttt

SEQ ID NO: 7121 - DNA, 19 bp, Artificial Sequence
  Synthetic oligonucleotide
  Mismatch hsa-miR-6085 MIMAT0023710
tgtgctccttcagcccctt

SEQ ID NO: 7122 - DNA, 22 bp, Artificial Sequence
  Synthetic oligonucleotide
  Mismatch hsa-miR-4459 MIMAT0018981
ctccacctcctttgcctcctgg

SEQ ID NO: 7123 - DNA, 22 bp, Artificial Sequence
  Synthetic oligonucleotide
  Mismatch hsa-miR-4667-5p MIMAT0019743
ggttctccttccactccccagt

SEQ ID NO: 7124 - DNA, 22 bp, Artificial Sequence
  Synthetic oligonucleotide
  Mismatch hsa-miR-146b-5p MIMAT0002809
agcctatggaacccagttctca

SEQ ID NO: 7125 - DNA, 23 bp, Artificial Sequence
  Synthetic oligonucleotide
  Mismatch hsa-miR-6730-5p MIMAT0027361
tctgacaaccccctcacctttct

SEQ ID NO: 7126 - DNA, 22 bp, Artificial Sequence
  Synthetic oligonucleotide
  Mismatch hsa-miR-378a-3p MIMAT0000732
gccttctgactttaagtccagt

SEQ ID NO: 7127 - DNA, 19 bp, Artificial Sequence
  Synthetic oligonucleotide
  Mismatch hsa-miR-3650 MIMAT0018070
ggactctattgacacacct

SEQ ID NO: 7128 - DNA, 22 bp, Artificial Sequence
  Synthetic oligonucleotide
  Mismatch hsa-miR-4798-3p MIMAT0019975
acttcggtatatctcgtgagtt

SEQ ID NO: 7129 - DNA, 22 bp, Artificial Sequence
  Synthetic oligonucleotide
  Mismatch hsa-miR-4789-5p MIMAT0019959
catacacatatttggtgtatac

SEQ ID NO: 7130 - DNA, 23 bp, Artificial Sequence
  Synthetic oligonucleotide
  Mismatch hsa-miR-4686 MIMAT0019773
aacaccagaaagttcagcagata

SEQ ID NO: 7131 - DNA, 22 bp, Artificial Sequence
  Synthetic oligonucleotide
  Mismatch hsa-miR-133b MIMAT0000770
tagctggttgatagggaccaaa

SEQ ID NO: 7132 - DNA, 22 bp, Artificial Sequence
  Synthetic oligonucleotide
  Mismatch hsa-miR-548ah-3p MIMAT0020957
gcaaaagtaaccacagtttttg

SEQ ID NO: 7133 - DNA, 21 bp, Artificial Sequence
  Synthetic oligonucleotide
  Mismatch hsa-miR-3663-5p MIMAT0018084
ccgagcaccatacagaccagc

SEQ ID NO: 7134 - DNA, 21 bp, Artificial Sequence
  Synthetic oligonucleotide
  Mismatch hsa-miR-410-5p MIMAT0026558
cgaactcatcttagacaacct

SEQ ID NO: 7135 - DNA, 25 bp, Artificial Sequence
  Synthetic oligonucleotide
  Mismatch hsa-miR-4728-3p MIMAT0019850
ctggggcaggagggtagtcagcatg

SEQ ID NO: 7136 - DNA, 22 bp, Artificial Sequence
  Synthetic oligonucleotide
  Mismatch hsa-miR-15b-5p MIMAT0000417
tgtaaaccatgtcgtgctgcta

SEQ ID NO: 7137 - DNA, 22 bp, Artificial Sequence
  Synthetic oligonucleotide
  Mismatch hsa-miR-548q MIMAT0011163
ccgccattactcctgcaccagc

SEQ ID NO: 7138 - DNA, 20 bp, Artificial Sequence
  Synthetic oligonucleotide
  Mismatch hsa-miR-572 MIMAT0003237
tgggccaccatcgagcggac

SEQ ID NO: 7139 - DNA, 19 bp, Artificial Sequence
  Synthetic oligonucleotide
  Mismatch hsa-miR-4659b-5p MIMAT0019733
ttcttctttaacatggcaa

SEQ ID NO: 7140 - DNA, 22 bp, Artificial Sequence
  Synthetic oligonucleotide
  Mismatch hsa-miR-4664-3p MIMAT0019738
gacggggctcattgaccggaag

SEQ ID NO: 7141 - DNA, 17 bp, Artificial Sequence
  Synthetic oligonucleotide
  Mismatch hsa-miR-4478 MIMAT0019006
ctcctctactcagcctc

SEQ ID NO: 7142 - DNA, 20 bp, Artificial Sequence
  Synthetic oligonucleotide
  Mismatch hsa-miR-4485-3p MIMAT0019019
ttagggtactacggccgtta

SEQ ID NO: 7143 - DNA, 21 bp, Artificial Sequence
  Synthetic oligonucleotide
  Mismatch hsa-miR-3648 MIMAT0018068
ccctcggcgactcccgcggct

SEQ ID NO: 7144 - DNA, 19 bp, Artificial Sequence
  Synthetic oligonucleotide
  Mismatch hsa-miR-4307 MIMAT0016860
ggaaacagataaaaacatt

SEQ ID NO: 7145 - DNA, 24 bp, Artificial Sequence
  Synthetic oligonucleotide
  Mismatch hsa-miR-6081 MIMAT0023706
ggcgccttggccgatactgctcct

SEQ ID NO: 7146 - DNA, 20 bp, Artificial Sequence
  Synthetic oligonucleotide
  Mismatch hsa-miR-937-5p MIMAT0022938
ccagccccattctgactcac

SEQ ID NO: 7147 - DNA, 21 bp, Artificial Sequence
  Synthetic oligonucleotide
  Mismatch hsa-miR-181d-3p MIMAT0026608
gtgacattcactccccggtgg

SEQ ID NO: 7148 - DNA, 21 bp, Artificial Sequence
  Synthetic oligonucleotide
  Mismatch hsa-miR-128-3p MIMAT0000424
aaagagaccgactcactgtga

SEQ ID NO: 7149 - DNA, 20 bp, Artificial Sequence
  Synthetic oligonucleotide
  Mismatch hsa-miR-6829-5p MIMAT0027558
tgccccttcctagcagccca

SEQ ID NO: 7150 - DNA, 21 bp, Artificial Sequence
  Synthetic oligonucleotide
  Mismatch hsa-miR-7856-5p MIMAT0030431
gatccctcagcatccttaaaa

SEQ ID NO: 7151 - DNA, 23 bp, Artificial Sequence
  Synthetic oligonucleotide
  Mismatch hsa-miR-4756-5p MIMAT0019899
agcagagagtgaatgcctccctg

SEQ ID NO: 7152 - DNA, 22 bp, Artificial Sequence
  Synthetic oligonucleotide
  Mismatch hsa-miR-3175 MIMAT0015052
acgtcactgcgccctctccccg

SEQ ID NO: 7153 - DNA, 21 bp, Artificial Sequence
  Synthetic oligonucleotide
  Mismatch hsa-miR-3158-5p MIMAT0019211
gaagggcttctcctctgcagg

SEQ ID NO: 7154 - DNA, 22 bp, Artificial Sequence
  Synthetic oligonucleotide
  Mismatch hsa-miR-4632-3p MIMAT0019688
ctagagcagcgtaagggcggca

SEQ ID NO: 7155 - DNA, 21 bp, Artificial Sequence
  Synthetic oligonucleotide
  Mismatch hsa-miR-1237-3p MIMAT0005592
ctgggggacgatgcagaagga

SEQ ID NO: 7156 - DNA, 25 bp, Artificial Sequence
  Synthetic oligonucleotide
  Mismatch hsa-miR-4517 MIMAT0019054
ctcagctgtgagttctatcatattt

SEQ ID NO: 7157 - DNA, 22 bp, Artificial Sequence
  Synthetic oligonucleotide
  Mismatch hsa-miR-155-3p MIMAT0004658
tgttaatgctatcatgtaggag

SEQ ID NO: 7158 - DNA, 23 bp, Artificial Sequence
  Synthetic oligonucleotide
  Mismatch hsa-miR-3128 MIMAT0014991
atgagagtttttctcttgccaga

SEQ ID NO: 7159 - DNA, 18 bp, Artificial Sequence
  Synthetic oligonucleotide
  Mismatch hsa-miR-1268a MIMAT0005922
cccccacttccacgcccg

SEQ ID NO: 7160 - DNA, 22 bp, Artificial Sequence
  Synthetic oligonucleotide
  Mismatch hsa-miR-4661-3p MIMAT0019730
tggactagctccatggatcctg

SEQ ID NO: 7161 - DNA, 20 bp, Artificial Sequence
  Synthetic oligonucleotide
  Mismatch hsa-miR-7152-3p MIMAT0028215
gcctcctgtttaggaccaga

SEQ ID NO: 7162 - DNA, 20 bp, Artificial Sequence
  Synthetic oligonucleotide
  Mismatch hsa-miR-6828-3p MIMAT0027557
ctgggaacataagagcagat

SEQ ID NO: 7163 - DNA, 20 bp, Artificial Sequence
  Synthetic oligonucleotide
  Mismatch hsa-miR-8056 MIMAT0030983
atgcatccaatcaatccacg

SEQ ID NO: 7164 - DNA, 18 bp, Artificial Sequence
  Synthetic oligonucleotide
  Mismatch hsa-miR-4444 MIMAT0018962
cgcctctctcaactcgag

SEQ ID NO: 7165 - DNA, 22 bp, Artificial Sequence
  Synthetic oligonucleotide
  Mismatch hsa-miR-6838-5p MIMAT0027578
aggagtcttgcttctgctgctt

SEQ ID NO: 7166 - DNA, 22 bp, Artificial Sequence
  Synthetic oligonucleotide
  Mismatch hsa-miR-6757-5p MIMAT0027414
tcatcctggccctccatcccta

SEQ ID NO: 7167 - DNA, 22 bp, Artificial Sequence
  Synthetic oligonucleotide
  Mismatch hsa-miR-501-5p MIMAT0002872
tctcacccaggatcaaaggatt

SEQ ID NO: 7168 - DNA, 21 bp, Artificial Sequence
  Synthetic oligonucleotide
  Mismatch hsa-miR-342-5p MIMAT0004694
tcaatcacagtcagcacccct

SEQ ID NO: 7169 - DNA, 23 bp, Artificial Sequence
  Synthetic oligonucleotide
  Mismatch hsa-miR-6758-5p MIMAT0027416
acatcacatcctctccctctcta

SEQ ID NO: 7170 - DNA, 23 bp, Artificial Sequence
  Synthetic oligonucleotide
  Mismatch hsa-miR-1229-3p MIMAT0005584
ctgtgggagggctatggtgagag

SEQ ID NO: 7171 - DNA, 22 bp, Artificial Sequence
  Synthetic oligonucleotide
  Mismatch hsa-miR-642a-3p MIMAT0020924
ggttccctctcttaatgtgtct

SEQ ID NO: 7172 - DNA, 22 bp, Artificial Sequence
  Synthetic oligonucleotide
  Mismatch hsa-miR-1284 MIMAT0005941
gaaaagccaggacctgtataga

SEQ ID NO: 7173 - DNA, 24 bp, Artificial Sequence
  Synthetic oligonucleotide
  Mismatch hsa-miR-1229-5p MIMAT0022942
cgctctcccccaattcctacccac

SEQ ID NO: 7174 - DNA, 23 bp, Artificial Sequence
  Synthetic oligonucleotide
  Mismatch hsa-miR-3185 MIMAT0015065
ccgcagaccgactaccttcttct

SEQ ID NO: 7175 - DNA, 20 bp, Artificial Sequence
  Synthetic oligonucleotide
  Mismatch hsa-miR-4270 MIMAT0016900
gccctcccccaactccctga

SEQ ID NO: 7176 - DNA, 22 bp, Artificial Sequence
  Synthetic oligonucleotide
  Mismatch hsa-miR-556-5p MIMAT0003220
ctcatattacatcgagctcatc

SEQ ID NO: 7177 - DNA, 22 bp, Artificial Sequence
  Synthetic oligonucleotide
  Mismatch hsa-miR-4705 MIMAT0019805
acagcaattacttagtgattga

SEQ ID NO: 7178 - DNA, 22 bp, Artificial Sequence
  Synthetic oligonucleotide
  Mismatch hsa-miR-519a-5p MIMAT0005452
cagaaagcgctctcctctagag

SEQ ID NO: 7179 - DNA, 22 bp, Artificial Sequence
  Synthetic oligonucleotide
  Mismatch hsa-miR-5094 MIMAT0021086
aggttcaaggctctcactgatt

SEQ ID NO: 7180 - DNA, 22 bp, Artificial Sequence
  Synthetic oligonucleotide
  Mismatch hsa-miR-145-3p MIMAT0004601
agaacagtattctcaggaatcc

SEQ ID NO: 7181 - DNA, 22 bp, Artificial Sequence
  Synthetic oligonucleotide
  Mismatch hsa-miR-759 MIMAT0010497
gtcaaaattgtccgcactctgc

SEQ ID NO: 7182 - DNA, 21 bp, Artificial Sequence
  Synthetic oligonucleotide
  Mismatch hsa-miR-2116-5p MIMAT0011160
agacctcctacactaagaacc

SEQ ID NO: 7183 - DNA, 23 bp, Artificial Sequence
  Synthetic oligonucleotide
  Mismatch hsa-miR-4741 MIMAT0019871
agccgacccctctagacagcccg

SEQ ID NO: 7184 - DNA, 24 bp, Artificial Sequence
  Synthetic oligonucleotide
  Mismatch hsa-miR-6789-5p MIMAT0027478
cccgcgcgcccggatcgcccctac

SEQ ID NO: 7185 - DNA, 21 bp, Artificial Sequence
  Synthetic oligonucleotide
  Mismatch hsa-miR-548t-5p MIMAT0015009
caaaaaccacattcacttttg

SEQ ID NO: 7186 - DNA, 22 bp, Artificial Sequence
  Synthetic oligonucleotide
  Mismatch hsa-miR-29c-3p MIMAT0000681
taaccgatttcttatggtgcta

SEQ ID NO: 7187 - DNA, 22 bp, Artificial Sequence
  Synthetic oligonucleotide
  Mismatch hsa-miR-483-5p MIMAT0004761
ctcccttcttttttcccgtctt

SEQ ID NO: 7188 - DNA, 22 bp, Artificial Sequence
  Synthetic oligonucleotide
  Mismatch hsa-let-7f-5p MIMAT0000067
aactatacaattcactacctca

SEQ ID NO: 7189 - DNA, 21 bp, Artificial Sequence
  Synthetic oligonucleotide
  Mismatch hsa-miR-1539 MIMAT0007401
gggcatctggatcgcgcagga

SEQ ID NO: 7190 - DNA, 22 bp, Artificial Sequence
  Synthetic oligonucleotide
  Mismatch hsa-miR-6842-5p MIMAT0027586
ccttggctagaatccaccccca

SEQ ID NO: 7191 - DNA, 23 bp, Artificial Sequence
  Synthetic oligonucleotide
  Mismatch hsa-miR-4745-5p MIMAT0019878
cgccgtcccgggtaccccactca

SEQ ID NO: 7192 - DNA, 22 bp, Artificial Sequence
  Synthetic oligonucleotide
  Mismatch hsa-miR-7111-5p MIMAT0028119
atggcctgtcccccctccccca

SEQ ID NO: 7193 - DNA, 22 bp, Artificial Sequence
  Synthetic oligonucleotide
  Mismatch hsa-miR-3675-3p MIMAT0018099
ttgggggagttttttagagatg

SEQ ID NO: 7194 - DNA, 22 bp, Artificial Sequence
  Synthetic oligonucleotide
  Mismatch hsa-let-7d-5p MIMAT0000065
aactatgcaactcactacctct

SEQ ID NO: 7195 - DNA, 22 bp, Artificial Sequence
  Synthetic oligonucleotide
  Mismatch hsa-miR-3607-5p MIMAT0017984
actgatttgctctatcacatgc

SEQ ID NO: 7196 - DNA, 22 bp, Artificial Sequence
  Synthetic oligonucleotide
  Mismatch hsa-miR-30e-5p MIMAT0000692
cttccagtcaaaaatgtttaca

SEQ ID NO: 7197 - DNA, 21 bp, Artificial Sequence
  Synthetic oligonucleotide
  Mismatch hsa-miR-555 MIMAT0003219
atcagaggttttgcttaccct

SEQ ID NO: 7198 - DNA, 22 bp, Artificial Sequence
  Synthetic oligonucleotide
  Mismatch hsa-miR-1271-5p MIMAT0005796
tgagtgcttgcctggtgccaag

SEQ ID NO: 7199 - DNA, 23 bp, Artificial Sequence
  Synthetic oligonucleotide
  Mismatch hsa-miR-18a-3p MIMAT0002891
ccagaaggagcatctagggcagt

SEQ ID NO: 7200 - DNA, 22 bp, Artificial Sequence
  Synthetic oligonucleotide
  Mismatch hsa-miR-1255b-2-3p MIMAT0022725
tggatgagcaataaaagtggtt

SEQ ID NO: 7201 - DNA, 19 bp, Artificial Sequence
  Synthetic oligonucleotide
  Mismatch hsa-miR-378b MIMAT0014999
ttctgcctttaagtccagt

SEQ ID NO: 7202 - DNA, 23 bp, Artificial Sequence
  Synthetic oligonucleotide
  Mismatch hsa-miR-7161-5p MIMAT0028232
accagttgcctcctcagtcttta

SEQ ID NO: 7203 - DNA, 22 bp, Artificial Sequence
  Synthetic oligonucleotide
  Mismatch hsa-miR-3915 MIMAT0018189
aataagaccattctttcctcaa

SEQ ID NO: 7204 - DNA, 22 bp, Artificial Sequence
  Synthetic oligonucleotide
  Mismatch hsa-miR-5007-3p MIMAT0021036
attagagtttgactcatatgat

SEQ ID NO: 7205 - DNA, 23 bp, Artificial Sequence
  Synthetic oligonucleotide
  Mismatch hsa-miR-4462 MIMAT0018986
ttcccaagccactttccgtgtca

SEQ ID NO: 7206 - DNA, 22 bp, Artificial Sequence
  Synthetic oligonucleotide
  Mismatch hsa-miR-6820-3p MIMAT0027541
ctgtggcagggatgaagtcaca

SEQ ID NO: 7207 - DNA, 22 bp, Artificial Sequence
  Synthetic oligonucleotide
  Mismatch hsa-miR-369-5p MIMAT0001621
gcgaatataacttggtcgatct

SEQ ID NO: 7208 - DNA, 22 bp, Artificial Sequence
  Synthetic oligonucleotide
  Mismatch hsa-miR-4537 MIMAT0019080
cagctaagctctactcggctca

SEQ ID NO: 7209 - DNA, 22 bp, Artificial Sequence
  Synthetic oligonucleotide
  Mismatch hsa-miR-5704 MIMAT0022498
gcataatgggacaatggcctaa

SEQ ID NO: 7210 - DNA, 22 bp, Artificial Sequence
  Synthetic oligonucleotide
  Mismatch hsa-miR-4450 MIMAT0018971
tcaccacttctttaaatcccca

SEQ ID NO: 7211 - DNA, 21 bp, Artificial Sequence
  Synthetic oligonucleotide
  Mismatch hsa-miR-4321 MIMAT0016874
cgcagggcggctcaccgctaa

SEQ ID NO: 7212 - DNA, 22 bp, Artificial Sequence
  Synthetic oligonucleotide
  Mismatch hsa-miR-4799-3p MIMAT0019977
tatataaatgctacatgccagt

SEQ ID NO: 7213 - DNA, 23 bp, Artificial Sequence
  Synthetic oligonucleotide
  Mismatch hsa-miR-4745-3p MIMAT0019879
gaccgtgagacgctgccgggcca

SEQ ID NO: 7214 - DNA, 21 bp, Artificial Sequence
  Synthetic oligonucleotide
  Mismatch hsa-miR-4725-5p MIMAT0019843
ggtgggaaggtcgcagggtct

SEQ ID NO: 7215 - DNA, 22 bp, Artificial Sequence
  Synthetic oligonucleotide
  Mismatch hsa-miR-6862-5p MIMAT0027625
aaagtctctccttgcatgcccg

SEQ ID NO: 7216 - DNA, 22 bp, Artificial Sequence
  Synthetic oligonucleotide
  Mismatch hsa-miR-654-5p MIMAT0003330
gcacatgttctatggcccacca

SEQ ID NO: 7217 - DNA, 22 bp, Artificial Sequence
  Synthetic oligonucleotide
  Mismatch hsa-miR-99a-3p MIMAT0004511
cagacccatagttgcgagcttg

SEQ ID NO: 7218 - DNA, 19 bp, Artificial Sequence
  Synthetic oligonucleotide
  Mismatch hsa-miR-626 MIMAT0003295
aagacattcccagacagct

SEQ ID NO: 7219 - DNA, 21 bp, Artificial Sequence
  Synthetic oligonucleotide
  Mismatch hsa-miR-130b-5p MIMAT0004680
gtagtgcaactaggaaagagt

SEQ ID NO: 7220 - DNA, 22 bp, Artificial Sequence
  Synthetic oligonucleotide
  Mismatch hsa-miR-487a-5p MIMAT0026559
cgaacacagcaaagataaccac

SEQ ID NO: 7221 - DNA, 23 bp, Artificial Sequence
  Synthetic oligonucleotide
  Mismatch hsa-miR-6799-3p MIMAT0027499
ctgtggggacactttgcagggca

SEQ ID NO: 7222 - DNA, 23 bp, Artificial Sequence
  Synthetic oligonucleotide
  Mismatch hsa-miR-3064-3p MIMAT0019865
tgtaaggtgttgttgtgtggcaa

SEQ ID NO: 7223 - DNA, 20 bp, Artificial Sequence
  Synthetic oligonucleotide
  Mismatch hsa-miR-6726-3p MIMAT0027354
ctagcgggaatcagggcgag

SEQ ID NO: 7224 - DNA, 21 bp, Artificial Sequence
  Synthetic oligonucleotide
  Mismatch hsa-miR-548au-3p MIMAT0022292
ctggtgcaaatataactgcca

SEQ ID NO: 7225 - DNA, 24 bp, Artificial Sequence
  Synthetic oligonucleotide
  Mismatch hsa-miR-939-5p MIMAT0004982
cacccccagagccctagctcccca

SEQ ID NO: 7226 - DNA, 22 bp, Artificial Sequence
  Synthetic oligonucleotide
  Mismatch hsa-miR-485-5p MIMAT0002175
gaattcatcacaaccagcctct

SEQ ID NO: 7227 - DNA, 17 bp, Artificial Sequence
  Synthetic oligonucleotide
  Mismatch hsa-miR-4251 MIMAT0016883
ttggcctctttctcagg

SEQ ID NO: 7228 - DNA, 21 bp, Artificial Sequence
  Synthetic oligonucleotide
  Mismatch hsa-miR-7158-3p MIMAT0028227
tgggcccaattcctagttcag

SEQ ID NO: 7229 - DNA, 20 bp, Artificial Sequence
  Synthetic oligonucleotide
  Mismatch hsa-miR-4506 MIMAT0019042
ttgcctcagttcacccattt

SEQ ID NO: 7230 - DNA, 21 bp, Artificial Sequence
  Synthetic oligonucleotide
  Mismatch hsa-miR-6880-3p MIMAT0027661
ctgggggaggtaagaaggcgg

SEQ ID NO: 7231 - DNA, 22 bp, Artificial Sequence
  Synthetic oligonucleotide
  Mismatch hsa-miR-144-5p MIMAT0004600
cttacagtatacaatgatatcc

SEQ ID NO: 7232 - DNA, 22 bp, Artificial Sequence
  Synthetic oligonucleotide
  Mismatch hsa-miR-122-5p MIMAT0000421
caaacaccattaccacactcca

SEQ ID NO: 7233 - DNA, 22 bp, Artificial Sequence
  Synthetic oligonucleotide
  Mismatch hsa-miR-206 MIMAT0000462
ccacacacttctctacattcca

SEQ ID NO: 7234 - DNA, 22 bp, Artificial Sequence
  Synthetic oligonucleotide
  Mismatch hsa-miR-548f-5p MIMAT0026739
aaaaactgtgaccacttttgca

SEQ ID NO: 7235 - DNA, 23 bp, Artificial Sequence
  Synthetic oligonucleotide
  Mismatch hsa-miR-136-5p MIMAT0000448
tccatcatcaaattaaatggagt

SEQ ID NO: 7236 - DNA, 22 bp, Artificial Sequence
  Synthetic oligonucleotide
  Mismatch hsa-miR-4715-5p MIMAT0019824
ccaccttaactatagccaactt

SEQ ID NO: 7237 - DNA, 23 bp, Artificial Sequence
  Synthetic oligonucleotide
  Mismatch hsa-miR-6810-3p MIMAT0027521
ctggggaacaagaaagcagggga

SEQ ID NO: 7238 - DNA, 20 bp, Artificial Sequence
  Synthetic oligonucleotide
  Mismatch hsa-miR-8072 MIMAT0030999
ctgcctaccctcccgccgcc

SEQ ID NO: 7239 - DNA, 18 bp, Artificial Sequence
  Synthetic oligonucleotide
  Mismatch hsa-miR-4295 MIMAT0016844
aaggaaattattgcactg

SEQ ID NO: 7240 - DNA, 21 bp, Artificial Sequence
  Synthetic oligonucleotide
  Mismatch hsa-miR-5195-3p MIMAT0021127
agccccctcaatgaactggat

SEQ ID NO: 7241 - DNA, 22 bp, Artificial Sequence
  Synthetic oligonucleotide
  Mismatch hsa-miR-3689f MIMAT0019010
tcccaggaagcttgatatcaca

SEQ ID NO: 7242 - DNA, 22 bp, Artificial Sequence
  Synthetic oligonucleotide
  Mismatch hsa-miR-1972 MIMAT0009447
tgagccactgtatctggcctga

SEQ ID NO: 7243 - DNA, 22 bp, Artificial Sequence
  Synthetic oligonucleotide
  Mismatch hsa-miR-340-5p MIMAT0004692
aatcagtctcaccgctttataa

SEQ ID NO: 7244 - DNA, 21 bp, Artificial Sequence
  Synthetic oligonucleotide
  Mismatch hsa-miR-3120-5p MIMAT0019198
tgtacagcagatacagacagg

SEQ ID NO: 7245 - DNA, 22 bp, Artificial Sequence
  Synthetic oligonucleotide
  Mismatch hsa-miR-485-3p MIMAT0002176
agagaggagagttgtgtatgac

SEQ ID NO: 7246 - DNA, 19 bp, Artificial Sequence
  Synthetic oligonucleotide
  Mismatch hsa-miR-632 MIMAT0003302
tcccacagatagcagacac

SEQ ID NO: 7247 - DNA, 22 bp, Artificial Sequence
  Synthetic oligonucleotide
  Mismatch hsa-miR-25-3p MIMAT0000081
tcagaccgagattagtgcaatg

SEQ ID NO: 7248 - DNA, 22 bp, Artificial Sequence
  Synthetic oligonucleotide
  Mismatch hsa-miR-4684-3p MIMAT0019770
acgtctccaccatcttgcaaca

SEQ ID NO: 7249 - DNA, 23 bp, Artificial Sequence
  Synthetic oligonucleotide
  Mismatch hsa-miR-6728-5p MIMAT0027357
cccctctggtccctccatcccaa

SEQ ID NO: 7250 - DNA, 19 bp, Artificial Sequence
  Synthetic oligonucleotide
  Mismatch hsa-miR-4289 MIMAT0016920
tgatagcctcgcacaatgc

SEQ ID NO: 7251 - DNA, 22 bp, Artificial Sequence
  Synthetic oligonucleotide
  Mismatch hsa-miR-3688-3p MIMAT0018116
agagtggcaaaacctttccata

SEQ ID NO: 7252 - DNA, 23 bp, Artificial Sequence
  Synthetic oligonucleotide
  Mismatch hsa-miR-6851-5p MIMAT0027602
gctggcccctagctccacctcct

SEQ ID NO: 7253 - DNA, 21 bp, Artificial Sequence
  Synthetic oligonucleotide
  Mismatch hsa-miR-455-3p MIMAT0004784
gtgtatatgcttatggactgc

SEQ ID NO: 7254 - DNA, 23 bp, Artificial Sequence
  Synthetic oligonucleotide
  Mismatch hsa-miR-425-5p MIMAT0003393
tcaacgggagtgtccgtgtcatt

SEQ ID NO: 7255 - DNA, 22 bp, Artificial Sequence
  Synthetic oligonucleotide
  Mismatch hsa-miR-181c-5p MIMAT0000258
actcaccgacaaattgaatgtt

SEQ ID NO: 7256 - DNA, 22 bp, Artificial Sequence
  Synthetic oligonucleotide
  Mismatch hsa-miR-6717-5p MIMAT0025846
tctctacatccttacatcgcct

SEQ ID NO: 7257 - DNA, 22 bp, Artificial Sequence
  Synthetic oligonucleotide
  Mismatch hsa-miR-5685 MIMAT0022475
cccgtgataaccactgggctgt

SEQ ID NO: 7258 - DNA, 21 bp, Artificial Sequence
  Synthetic oligonucleotide
  Mismatch hsa-miR-3668 MIMAT0018091
attttgatcatcctctacatt

SEQ ID NO: 7259 - DNA, 22 bp, Artificial Sequence
  Synthetic oligonucleotide
  Mismatch hsa-miR-338-3p MIMAT0000763
caacaaaatcatcgatgctgga

SEQ ID NO: 7260 - DNA, 21 bp, Artificial Sequence
  Synthetic oligonucleotide
  Mismatch hsa-miR-499b-5p MIMAT0019897
tgaacatcactacaagtctgt

SEQ ID NO: 7261 - DNA, 22 bp, Artificial Sequence
  Synthetic oligonucleotide
  Mismatch hsa-miR-211-5p MIMAT0000268
aggcgaaggatatcaaagggaa

SEQ ID NO: 7262 - DNA, 22 bp, Artificial Sequence
  Synthetic oligonucleotide
  Mismatch hsa-miR-153-5p MIMAT0026480
agctgcaacatttcaaaaatga

SEQ ID NO: 7263 - DNA, 22 bp, Artificial Sequence
  Synthetic oligonucleotide
  Mismatch hsa-miR-4703-3p MIMAT0019802
gtggcaatacatcacaactaca

SEQ ID NO: 7264 - DNA, 23 bp, Artificial Sequence
  Synthetic oligonucleotide
  Mismatch hsa-miR-767-5p MIMAT0003882
catgctcagacattcatggtgca

SEQ ID NO: 7265 - DNA, 21 bp, Artificial Sequence
  Synthetic oligonucleotide
  Mismatch hsa-miR-219a-5p MIMAT0000276
agaattgcgtccggacaatca

SEQ ID NO: 7266 - DNA, 22 bp, Artificial Sequence
  Synthetic oligonucleotide
  Mismatch hsa-miR-219a-1-3p MIMAT0004567
cgggacgtccaatctcaactct

SEQ ID NO: 7267 - DNA, 22 bp, Artificial Sequence
  Synthetic oligonucleotide
  Mismatch hsa-miR-4436b-5p MIMAT0019940
ggcagggcaggttgaagtggac

SEQ ID NO: 7268 - DNA, 22 bp, Artificial Sequence
  Synthetic oligonucleotide
  Mismatch hsa-miR-3121-5p MIMAT0019199
cttaaatagaactggcaaagga

SEQ ID NO: 7269 - DNA, 21 bp, Artificial Sequence
  Synthetic oligonucleotide
  Mismatch hsa-miR-5572 MIMAT0022260
agcagacccccacaccccaac

SEQ ID NO: 7270 - DNA, 21 bp, Artificial Sequence
  Synthetic oligonucleotide
  Mismatch hsa-miR-4523 MIMAT0019061
acagccgaggttctctcggtc

SEQ ID NO: 7271 - DNA, 21 bp, Artificial Sequence
  Synthetic oligonucleotide
  Mismatch hsa-miR-140-3p MIMAT0004597
ccgtggttctttcctgtggta

SEQ ID NO: 7272 - DNA, 21 bp, Artificial Sequence
  Synthetic oligonucleotide
  Mismatch hsa-miR-3659 MIMAT0018080
tgccctcgtaatcaacactca

SEQ ID NO: 7273 - DNA, 22 bp, Artificial Sequence
  Synthetic oligonucleotide
  Mismatch hsa-miR-3679-3p MIMAT0018105
gatgaagattatcggggggaag

SEQ ID NO: 7274 - DNA, 22 bp, Artificial Sequence
  Synthetic oligonucleotide
  Mismatch hsa-miR-4526 MIMAT0019065
agcggccagcctcgctgtcagc

SEQ ID NO: 7275 - DNA, 21 bp, Artificial Sequence
  Synthetic oligonucleotide
  Mismatch hsa-miR-7850-5p MIMAT0030425
ccagccacaccttgtccaaac

SEQ ID NO: 7276 - DNA, 19 bp, Artificial Sequence
  Synthetic oligonucleotide
  Mismatch hsa-miR-6134 MIMAT0024618
tctacatctcaccacctca

SEQ ID NO: 7277 - DNA, 21 bp, Artificial Sequence
  Synthetic oligonucleotide
  Mismatch hsa-miR-625-5p MIMAT0003294
ggactatagatttttccccct

SEQ ID NO: 7278 - DNA, 21 bp, Artificial Sequence
  Synthetic oligonucleotide
  Mismatch hsa-miR-369-3p MIMAT0000721
aaagatcaactttgtattatt

SEQ ID NO: 7279 - DNA, 22 bp, Artificial Sequence
  Synthetic oligonucleotide
  Mismatch hsa-miR-1287-3p MIMAT0026738
atcactgcatccatggctagag

SEQ ID NO: 7280 - DNA, 22 bp, Artificial Sequence
  Synthetic oligonucleotide
  Mismatch hsa-miR-132-3p MIMAT0000426
cgaccatggctacagactgtta

SEQ ID NO: 7281 - DNA, 22 bp, Artificial Sequence
  Synthetic oligonucleotide
  Mismatch hsa-miR-6882-5p MIMAT0027664
ctgcttcagcttttgacttgta

SEQ ID NO: 7282 - DNA, 22 bp, Artificial Sequence
  Synthetic oligonucleotide
  Mismatch hsa-miR-1537-5p MIMAT0026765
agaaaactgacctattacagct

SEQ ID NO: 7283 - DNA, 21 bp, Artificial Sequence
  Synthetic oligonucleotide
  Mismatch hsa-miR-5002-3p MIMAT0021024
aagtggtcagcaaggcagtca

SEQ ID NO: 7284 - DNA, 23 bp, Artificial Sequence
  Synthetic oligonucleotide
  Mismatch hsa-miR-639 MIMAT0003309
acagcgctcgcattcgcagcgat

SEQ ID NO: 7285 - DNA, 23 bp, Artificial Sequence
  Synthetic oligonucleotide
  Mismatch hsa-miR-6756-5p MIMAT0027412
agccccacctcctaccccaccct

SEQ ID NO: 7286 - DNA, 21 bp, Artificial Sequence
  Synthetic oligonucleotide
  Mismatch hsa-miR-1908-3p MIMAT0026916
cggggcggagttggcggccgg

SEQ ID NO: 7287 - DNA, 21 bp, Artificial Sequence
  Synthetic oligonucleotide
  Mismatch hsa-miR-6811-3p MIMAT0027523
ctgcagggacttgcacaggct

SEQ ID NO: 7288 - DNA, 21 bp, Artificial Sequence
  Synthetic oligonucleotide
  Mismatch hsa-miR-6514-3p MIMAT0025485
ctggagtggataaacaggcag

SEQ ID NO: 7289 - DNA, 24 bp, Artificial Sequence
  Synthetic oligonucleotide
  Mismatch hsa-miR-6738-3p MIMAT0027378
ctgggagtagaatataggcagaag

SEQ ID NO: 7290 - DNA, 22 bp, Artificial Sequence
  Synthetic oligonucleotide
  Mismatch hsa-miR-548h-5p MIMAT0005928
gacaaaaaccgtaattactttt

SEQ ID NO: 7291 - DNA, 21 bp, Artificial Sequence
  Synthetic oligonucleotide
  Mismatch hsa-miR-595 MIMAT0003263
agacacaccatagcacacttc

SEQ ID NO: 7292 - DNA, 21 bp, Artificial Sequence
  Synthetic oligonucleotide
  Mismatch hsa-miR-662 MIMAT0003325
ctgctgggccttaacgtggga

SEQ ID NO: 7293 - DNA, 22 bp, Artificial Sequence
  Synthetic oligonucleotide
  Mismatch hsa-miR-130a-3p MIMAT0000425
atgcccttttattattgcactg

SEQ ID NO: 7294 - DNA, 19 bp, Artificial Sequence
  Synthetic oligonucleotide
  Mismatch hsa-miR-4736 MIMAT0019862
cagcccagtcaacctgcct

SEQ ID NO: 7295 - DNA, 21 bp, Artificial Sequence
  Synthetic oligonucleotide
  Mismatch hsa-miR-5088-3p MIMAT0027041
tgagggcccaaaaagaaggga

SEQ ID NO: 7296 - DNA, 22 bp, Artificial Sequence
  Synthetic oligonucleotide
  Mismatch hsa-miR-5004-5p MIMAT0021027
tcgtgaatttgttctgtcctca

SEQ ID NO: 7297 - DNA, 23 bp, Artificial Sequence
  Synthetic oligonucleotide
  Mismatch hsa-miR-142-3p MIMAT0000434
tccataaagtagataacactaca

SEQ ID NO: 7298 - DNA, 21 bp, Artificial Sequence
  Synthetic oligonucleotide
  Mismatch hsa-miR-4474-5p MIMAT0019234
tgtgtctgattttgagactaa

SEQ ID NO: 7299 - DNA, 20 bp, Artificial Sequence
  Synthetic oligonucleotide
  Mismatch hsa-miR-520d-5p MIMAT0002855
gaaagggctctcctttgtag

SEQ ID NO: 7300 - DNA, 20 bp, Artificial Sequence
  Synthetic oligonucleotide
  Mismatch hsa-miR-1205 MIMAT0005869
ctcaaagcattccctgcaga

SEQ ID NO: 7301 - DNA, 22 bp, Artificial Sequence
  Synthetic oligonucleotide
  Mismatch hsa-miR-1537-3p MIMAT0007399
acaactgtaacctgacggtttt

SEQ ID NO: 7302 - DNA, 22 bp, Artificial Sequence
  Synthetic oligonucleotide
  Mismatch hsa-miR-5187-5p MIMAT0021117
tccacttcaatttctcatccca

SEQ ID NO: 7303 - DNA, 22 bp, Artificial Sequence
  Synthetic oligonucleotide
  Mismatch hsa-miR-4428 MIMAT0018943
gctccatgttcttgtctccttg

SEQ ID NO: 7304 - DNA, 21 bp, Artificial Sequence
  Synthetic oligonucleotide
  Mismatch hsa-miR-4646-3p MIMAT0019708
ctgggaagggtaagggacaat

SEQ ID NO: 7305 - DNA, 22 bp, Artificial Sequence
  Synthetic oligonucleotide
  Mismatch hsa-miR-3529-5p MIMAT0019828
aacaacaaatcttagtctacct

SEQ ID NO: 7306 - DNA, 21 bp, Artificial Sequence
  Synthetic oligonucleotide
  Mismatch hsa-miR-6809-3p MIMAT0027519
ctgggaaggaatgaagagaag

SEQ ID NO: 7307 - DNA, 22 bp, Artificial Sequence
  Synthetic oligonucleotide
  Mismatch hsa-miR-1-5p MIMAT0031892
atgggcatatattgaagtatgt

SEQ ID NO: 7308 - DNA, 21 bp, Artificial Sequence
  Synthetic oligonucleotide
  Mismatch hsa-miR-27a-3p MIMAT0000084
gcggaacttaatcactgtgaa

SEQ ID NO: 7309 - DNA, 23 bp, Artificial Sequence
  Synthetic oligonucleotide
  Mismatch hsa-miR-671-5p MIMAT0003880
ctccagcccctcttgggcttcct

SEQ ID NO: 7310 - DNA, 21 bp, Artificial Sequence
  Synthetic oligonucleotide
  Mismatch hsa-miR-1285-5p MIMAT0022719
cctgggcaacttagtgagatc

SEQ ID NO: 7311 - DNA, 22 bp, Artificial Sequence
  Synthetic oligonucleotide
  Mismatch hsa-miR-5007-5p MIMAT0021035
aaaccatatcaatcagactcta

SEQ ID NO: 7312 - DNA, 21 bp, Artificial Sequence
  Synthetic oligonucleotide
  Mismatch hsa-miR-3919 MIMAT0018193
actgagtcctccgttctctgc

SEQ ID NO: 7313 - DNA, 22 bp, Artificial Sequence
  Synthetic oligonucleotide
  Mismatch hsa-miR-8059 MIMAT0030986
gccttttcatcctcagttcccc

SEQ ID NO: 7314 - DNA, 22 bp, Artificial Sequence
  Synthetic oligonucleotide
  Mismatch hsa-miR-539-5p MIMAT0003163
acacaccaaggtcaatttctcc

SEQ ID NO: 7315 - DNA, 22 bp, Artificial Sequence
  Synthetic oligonucleotide
  Mismatch hsa-miR-3124-3p MIMAT0019200
acttcacgggaacgaggaaagt

SEQ ID NO: 7316 - DNA, 20 bp, Artificial Sequence
  Synthetic oligonucleotide
  Mismatch hsa-miR-33b-5p MIMAT0003301
gcaatgcaattgcaatgcac

SEQ ID NO: 7317 - DNA, 20 bp, Artificial Sequence
  Synthetic oligonucleotide
  Mismatch hsa-miR-7108-3p MIMAT0028114
ctgtggggaatcgggcgggt

SEQ ID NO: 7318 - DNA, 26 bp, Artificial Sequence
  Synthetic oligonucleotide
  Mismatch hsa-miR-3916 MIMAT0018190
ctgagaaccagccatcccttcctctt

SEQ ID NO: 7319 - DNA, 17 bp, Artificial Sequence
  Synthetic oligonucleotide
  Mismatch hsa-miR-4275 MIMAT0016905
aaagaaacggtaattgg

SEQ ID NO: 7320 - DNA, 23 bp, Artificial Sequence
  Synthetic oligonucleotide
  Mismatch hsa-miR-6744-3p MIMAT0027390
ctgcaggatgacttgagaggccc

SEQ ID NO: 7321 - DNA, 20 bp, Artificial Sequence
  Synthetic oligonucleotide
  Mismatch hsa-miR-6756-3p MIMAT0027413
ctgggcaggatggaagggga

SEQ ID NO: 7322 - DNA, 22 bp, Artificial Sequence
  Synthetic oligonucleotide
  Mismatch hsa-miR-3170 MIMAT0015045
actgtctgtctttgaaccccag

SEQ ID NO: 7323 - DNA, 19 bp, Artificial Sequence
  Synthetic oligonucleotide
  Mismatch hsa-miR-3649 MIMAT0018069
cttagacatccaggtccct

SEQ ID NO: 7324 - DNA, 23 bp, Artificial Sequence
  Synthetic oligonucleotide
  Mismatch hsa-miR-4754 MIMAT0019894
actccgctaaccttggtccgcat

SEQ ID NO: 7325 - DNA, 22 bp, Artificial Sequence
  Synthetic oligonucleotide
  Mismatch hsa-miR-5586-3p MIMAT0022288
ctttaaccagcccgtcactctg

SEQ ID NO: 7326 - DNA, 20 bp, Artificial Sequence
  Synthetic oligonucleotide
  Mismatch hsa-miR-490-5p MIMAT0004764
acccacctgatgatccatgg

SEQ ID NO: 7327 - DNA, 23 bp, Artificial Sequence
  Synthetic oligonucleotide
  Mismatch hsa-miR-34c-5p MIMAT0000686
gcaatcagctaatcacactgcct

SEQ ID NO: 7328 - DNA, 22 bp, Artificial Sequence
  Synthetic oligonucleotide
  Mismatch hsa-miR-522-3p MIMAT0002868
acactctaaagaaaaccatttt

SEQ ID NO: 7329 - DNA, 22 bp, Artificial Sequence
  Synthetic oligonucleotide
  Mismatch hsa-miR-3689b-5p MIMAT0018180
tcccaggaacctcgatatcaca

SEQ ID NO: 7330 - DNA, 17 bp, Artificial Sequence
  Synthetic oligonucleotide
  Mismatch hsa-miR-4306 MIMAT0016858
tactgctcttctctcca

SEQ ID NO: 7331 - DNA, 22 bp, Artificial Sequence
  Synthetic oligonucleotide
  Mismatch hsa-miR-4515 MIMAT0019052
gggctgccgggtatccagtcct

SEQ ID NO: 7332 - DNA, 24 bp, Artificial Sequence
  Synthetic oligonucleotide
  Mismatch hsa-miR-1254 MIMAT0005905
actgcaggctccaatttccaggct

SEQ ID NO: 7333 - DNA, 23 bp, Artificial Sequence
  Synthetic oligonucleotide
  Mismatch hsa-miR-373-3p MIMAT0000726
acaccccaaaattaaagcacttc

SEQ ID NO: 7334 - DNA, 22 bp, Artificial Sequence
  Synthetic oligonucleotide
  Mismatch hsa-miR-365b-5p MIMAT0022833
acagctgcccccaaaagtccct

SEQ ID NO: 7335 - DNA, 23 bp, Artificial Sequence
  Synthetic oligonucleotide
  Mismatch hsa-miR-4802-3p MIMAT0019982
gcttgaaggtttttatccatgta

SEQ ID NO: 7336 - DNA, 21 bp, Artificial Sequence
  Synthetic oligonucleotide
  Mismatch hsa-miR-548aj-3p MIMAT0018990
taaaagtaatcacagttttta

SEQ ID NO: 7337 - DNA, 24 bp, Artificial Sequence
  Synthetic oligonucleotide
  Mismatch hsa-miR-6876-3p MIMAT0027653
ctgagaaggaaaattcagacagct

SEQ ID NO: 7338 - DNA, 22 bp, Artificial Sequence
  Synthetic oligonucleotide
  Mismatch hsa-miR-185-5p MIMAT0000455
tcaggaactgctcttctctcca

SEQ ID NO: 7339 - DNA, 23 bp, Artificial Sequence
  Synthetic oligonucleotide
  Mismatch hsa-miR-3127-5p MIMAT0014990
cttcccattccattagccctgat

SEQ ID NO: 7340 - DNA, 21 bp, Artificial Sequence
  Synthetic oligonucleotide
  Mismatch hsa-miR-6503-3p MIMAT0025463
ggaggtctgctccctagtccc

SEQ ID NO: 7341 - DNA, 25 bp, Artificial Sequence
  Synthetic oligonucleotide
  Mismatch hsa-miR-3180-5p MIMAT0015057
cgacgtggggcggaatgtctggaag

SEQ ID NO: 7342 - DNA, 22 bp, Artificial Sequence
  Synthetic oligonucleotide
  Mismatch hsa-miR-5698 MIMAT0022491
ccacaatcactatactccccca

SEQ ID NO: 7343 - DNA, 22 bp, Artificial Sequence
  Synthetic oligonucleotide
  Mismatch hsa-miR-4477b MIMAT0019005
atcaatcacaatcgtccttaat

SEQ ID NO: 7344 - DNA, 21 bp, Artificial Sequence
  Synthetic oligonucleotide
  Mismatch hsa-miR-888-5p MIMAT0004916
tgactgacagtcttttgagta

SEQ ID NO: 7345 - DNA, 20 bp, Artificial Sequence
  Synthetic oligonucleotide
  Mismatch hsa-miR-548ah-5p MIMAT0018972
caaacactgttatcactttt

SEQ ID NO: 7346 - DNA, 22 bp, Artificial Sequence
  Synthetic oligonucleotide
  Mismatch hsa-miR-7-2-3p MIMAT0004554
ttaggtagactaagatttgttg

SEQ ID NO: 7347 - DNA, 22 bp, Artificial Sequence
  Synthetic oligonucleotide
  Mismatch hsa-miR-4520-2-3p MIMAT0020300
acctgcgtgttccctgtccaaa

SEQ ID NO: 7348 - DNA, 21 bp, Artificial Sequence
  Synthetic oligonucleotide
  Mismatch hsa-miR-6077 MIMAT0023702
gaaggccgtattgctcttccc

SEQ ID NO: 7349 - DNA, 17 bp, Artificial Sequence
  Synthetic oligonucleotide
  Mismatch hsa-miR-3123 MIMAT0014985
gattaattaattctctg

SEQ ID NO: 7350 - DNA, 23 bp, Artificial Sequence
  Synthetic oligonucleotide
  Mismatch hsa-miR-4693-5p MIMAT0019784
tgtgacagtgaatctcacagtat

SEQ ID NO: 7351 - DNA, 23 bp, Artificial Sequence
  Synthetic oligonucleotide
  Mismatch hsa-miR-6807-3p MIMAT0027515
ctgggccaagcaaaaatgcagtg

SEQ ID NO: 7352 - DNA, 17 bp, Artificial Sequence
  Synthetic oligonucleotide
  Mismatch hsa-miR-4283 MIMAT0016914
aaactcattgagcccca

SEQ ID NO: 7353 - DNA, 23 bp, Artificial Sequence
  Synthetic oligonucleotide
  Mismatch hsa-miR-922 MIMAT0004972
gacgtagtcctaccctctgctgc

SEQ ID NO: 7354 - DNA, 21 bp, Artificial Sequence
  Synthetic oligonucleotide
  Mismatch hsa-miR-6890-5p MIMAT0027680
cctactctgctttaccccatg

SEQ ID NO: 7355 - DNA, 18 bp, Artificial Sequence
  Synthetic oligonucleotide
  Mismatch hsa-miR-4284 MIMAT0016915
atggggtattgtgagccc

SEQ ID NO: 7356 - DNA, 21 bp, Artificial Sequence
  Synthetic oligonucleotide
  Mismatch hsa-miR-4789-3p MIMAT0019960
tatatacacccactatgtgtg

SEQ ID NO: 7357 - DNA, 22 bp, Artificial Sequence
  Synthetic oligonucleotide
  Mismatch hsa-miR-7702 MIMAT0030017
tcagggagtctaacagtctaag

SEQ ID NO: 7358 - DNA, 18 bp, Artificial Sequence
  Synthetic oligonucleotide
  Mismatch hsa-miR-513a-5p MIMAT0002877
atgacactcccctgtgaa

SEQ ID NO: 7359 - DNA, 22 bp, Artificial Sequence
  Synthetic oligonucleotide
  Mismatch hsa-miR-6787-5p MIMAT0027474
gcagccagctcctcccccgcca

SEQ ID NO: 7360 - DNA, 22 bp, Artificial Sequence
  Synthetic oligonucleotide
  Mismatch hsa-miR-3667-5p MIMAT0018089
accttctcctctttgggtcttt

SEQ ID NO: 7361 - DNA, 22 bp, Artificial Sequence
  Synthetic oligonucleotide
  Mismatch hsa-miR-450a-5p MIMAT0001545
atattaggaacttatcgcaaaa

SEQ ID NO: 7362 - DNA, 23 bp, Artificial Sequence
  Synthetic oligonucleotide
  Mismatch hsa-miR-3118 MIMAT0014980
agaattttcatatcgcagtcaca

SEQ ID NO: 7363 - DNA, 21 bp, Artificial Sequence
  Synthetic oligonucleotide
  Mismatch hsa-miR-6076 MIMAT0023701
ccacctctcccttgtcatgct

SEQ ID NO: 7364 - DNA, 19 bp, Artificial Sequence
  Synthetic oligonucleotide
  Mismatch hsa-miR-1290 MIMAT0005880
tccctgatttaaaaatcca

SEQ ID NO: 7365 - DNA, 22 bp, Artificial Sequence
  Synthetic oligonucleotide
  Mismatch hsa-miR-3163 MIMAT0015037
gtcttactgcctccattttata

SEQ ID NO: 7366 - DNA, 23 bp, Artificial Sequence
  Synthetic oligonucleotide
  Mismatch hsa-miR-7154-5p MIMAT0028218
ccaagctagaccttgttcatgaa

SEQ ID NO: 7367 - DNA, 22 bp, Artificial Sequence
  Synthetic oligonucleotide
  Mismatch hsa-miR-663a MIMAT0003326
gcggtcccgcgatgccccgcct

SEQ ID NO: 7368 - DNA, 22 bp, Artificial Sequence
  Synthetic oligonucleotide
  Mismatch hsa-miR-6824-5p MIMAT0027548
tccctggcccattctcccctac

SEQ ID NO: 7369 - DNA, 23 bp, Artificial Sequence
  Synthetic oligonucleotide
  Mismatch hsa-miR-9-5p MIMAT0000441
tcatacagctagtcaaccaaaga

SEQ ID NO: 7370 - DNA, 19 bp, Artificial Sequence
  Synthetic oligonucleotide
  Mismatch hsa-miR-548f-3p MIMAT0005895
aaaagtaaccacagttttt

SEQ ID NO: 7371 - DNA, 25 bp, Artificial Sequence
  Synthetic oligonucleotide
  Mismatch hsa-miR-378c MIMAT0016847
ccactcttctgactttaagtccagt

SEQ ID NO: 7372 - DNA, 22 bp, Artificial Sequence
  Synthetic oligonucleotide
  Mismatch hsa-miR-216a-3p MIMAT0022844
ataatcccagaatccactgtga

SEQ ID NO: 7373 - DNA, 24 bp, Artificial Sequence
  Synthetic oligonucleotide
  Mismatch hsa-miR-6831-5p MIMAT0027562
gacctcctcctcattctctaccta

SEQ ID NO: 7374 - DNA, 22 bp, Artificial Sequence
  Synthetic oligonucleotide
  Mismatch hsa-miR-892c-3p MIMAT0025858
tccactcagaatagaaacagtg

SEQ ID NO: 7375 - DNA, 24 bp, Artificial Sequence
  Synthetic oligonucleotide
  Mismatch hsa-miR-125a-5p MIMAT0000443
tcacaggttaaagaatctcaggga

SEQ ID NO: 7376 - DNA, 19 bp, Artificial Sequence
  Synthetic oligonucleotide
  Mismatch hsa-miR-378e MIMAT0018927
tcctgactttaagtccagt

SEQ ID NO: 7377 - DNA, 22 bp, Artificial Sequence
  Synthetic oligonucleotide
  Mismatch hsa-miR-3617-5p MIMAT0017997
cccatcttgcatttatgtcttt

SEQ ID NO: 7378 - DNA, 24 bp, Artificial Sequence
  Synthetic oligonucleotide
  Mismatch hsa-miR-3662 MIMAT0018083
catcagtcactacctatcattttc

SEQ ID NO: 7379 - DNA, 19 bp, Artificial Sequence
  Synthetic oligonucleotide
  Mismatch hsa-miR-604 MIMAT0003272
gtcctgaaccccgcagcct

SEQ ID NO: 7380 - DNA, 18 bp, Artificial Sequence
  Synthetic oligonucleotide
  Mismatch hsa-miR-4278 MIMAT0016910
caagggcttaccccctag

SEQ ID NO: 7381 - DNA, 22 bp, Artificial Sequence
  Synthetic oligonucleotide
  Mismatch hsa-miR-3140-3p MIMAT0015008
actacctgaatctccaaaagct

SEQ ID NO: 7382 - DNA, 20 bp, Artificial Sequence
  Synthetic oligonucleotide
  Mismatch hsa-miR-181b-2-3p MIMAT0031893
tgcattcatcaatcagtgag

SEQ ID NO: 7383 - DNA, 21 bp, Artificial Sequence
  Synthetic oligonucleotide
  Mismatch hsa-miR-4540 MIMAT0019083
taaacctacaaacaggactaa

SEQ ID NO: 7384 - DNA, 19 bp, Artificial Sequence
  Synthetic oligonucleotide
  Mismatch hsa-miR-6130 MIMAT0024614
catacaatttactccctca

SEQ ID NO: 7385 - DNA, 22 bp, Artificial Sequence
  Synthetic oligonucleotide
  Mismatch hsa-miR-3907 MIMAT0018179
tgtgagccagctcggagcacct

SEQ ID NO: 7386 - DNA, 22 bp, Artificial Sequence
  Synthetic oligonucleotide
  Mismatch hsa-miR-493-3p MIMAT0003161
cctggcacacaacagaccttca

SEQ ID NO: 7387 - DNA, 17 bp, Artificial Sequence
  Synthetic oligonucleotide
  Mismatch hsa-miR-4456 MIMAT0018978
aaaaggttgccaccagg

SEQ ID NO: 7388 - DNA, 22 bp, Artificial Sequence
  Synthetic oligonucleotide
  Mismatch hsa-miR-5009-3p MIMAT0021042
ttttggactttttgatttagga

SEQ ID NO: 7389 - DNA, 22 bp, Artificial Sequence
  Synthetic oligonucleotide
  Mismatch hsa-miR-99a-5p MIMAT0000097
cacaagatcggtcctacgggtt

SEQ ID NO: 7390 - DNA, 22 bp, Artificial Sequence
  Synthetic oligonucleotide
  Mismatch hsa-miR-196a-5p MIMAT0000226
cccaacaacatataactaccta

SEQ ID NO: 7391 - DNA, 23 bp, Artificial Sequence
  Synthetic oligonucleotide
  Mismatch hsa-miR-4743-5p MIMAT0019874
atgcctcctgtcttatccggcca

SEQ ID NO: 7392 - DNA, 22 bp, Artificial Sequence
  Synthetic oligonucleotide
  Mismatch hsa-miR-4723-3p MIMAT0019839
tttggggaggaatcagagaggg

SEQ ID NO: 7393 - DNA, 19 bp, Artificial Sequence
  Synthetic oligonucleotide
  Mismatch hsa-miR-6763-5p MIMAT0027426
ctccccagttactccccag

SEQ ID NO: 7394 - DNA, 22 bp, Artificial Sequence
  Synthetic oligonucleotide
  Mismatch hsa-miR-6809-5p MIMAT0027518
tgatcctcttccctccttgcca

SEQ ID NO: 7395 - DNA, 21 bp, Artificial Sequence
  Synthetic oligonucleotide
  Mismatch hsa-miR-890 MIMAT0004912
caactgatgctcttccaagta

SEQ ID NO: 7396 - DNA, 21 bp, Artificial Sequence
  Synthetic oligonucleotide
  Mismatch hsa-miR-4667-3p MIMAT0019744
ctgtggggactaaaggaggga

SEQ ID NO: 7397 - DNA, 22 bp, Artificial Sequence
  Synthetic oligonucleotide
  Mismatch hsa-miR-1247-5p MIMAT0005899
tccggggacgattgggacgggt

SEQ ID NO: 7398 - DNA, 22 bp, Artificial Sequence
  Synthetic oligonucleotide
  Mismatch hsa-miR-6512-5p MIMAT0025480
tcttccagctcccctaatggta

SEQ ID NO: 7399 - DNA, 24 bp, Artificial Sequence
  Synthetic oligonucleotide
  Mismatch hsa-miR-3613-3p MIMAT0017991
gaagggttgggctcctttttttgt

SEQ ID NO: 7400 - DNA, 22 bp, Artificial Sequence
  Synthetic oligonucleotide
  Mismatch hsa-miR-548a-5p MIMAT0004803
ggtaaaactcgttattactttt

SEQ ID NO: 7401 - DNA, 21 bp, Artificial Sequence
  Synthetic oligonucleotide
  Mismatch hsa-miR-1180-5p MIMAT0026735
tattcccggctaggtgggtcc

SEQ ID NO: 7402 - DNA, 22 bp, Artificial Sequence
  Synthetic oligonucleotide
  Mismatch hsa-miR-526b-3p MIMAT0002836
gcctctaaaagatagcactttc

SEQ ID NO: 7403 - DNA, 22 bp, Artificial Sequence
  Synthetic oligonucleotide
  Mismatch hsa-miR-4669 MIMAT0019749
cctcctccactctccggacaca

SEQ ID NO: 7404 - DNA, 21 bp, Artificial Sequence
  Synthetic oligonucleotide
  Mismatch hsa-miR-497-5p MIMAT0002820
acaaaccacaacgtgctgctg

SEQ ID NO: 7405 - DNA, 17 bp, Artificial Sequence
  Synthetic oligonucleotide
  Mismatch hsa-miR-4426 MIMAT0018941
aaagtatatccatcttc

SEQ ID NO: 7406 - DNA, 24 bp, Artificial Sequence
  Synthetic oligonucleotide
  Mismatch hsa-miR-3976 MIMAT0019361
acattaatcttcccactctctata

SEQ ID NO: 7407 - DNA, 18 bp, Artificial Sequence
  Synthetic oligonucleotide
  Mismatch hsa-miR-3196 MIMAT0015080
gaggccctcgccgccccg

SEQ ID NO: 7408 - DNA, 22 bp, Artificial Sequence
  Synthetic oligonucleotide
  Mismatch hsa-miR-1273g-5p MIMAT0020602
acttactgcagtttcaaccacc

SEQ ID NO: 7409 - DNA, 24 bp, Artificial Sequence
  Synthetic oligonucleotide
  Mismatch hsa-miR-6840-5p MIMAT0027582
atctgcaggtcttcacccgggggt

SEQ ID NO: 7410 - DNA, 23 bp, Artificial Sequence
  Synthetic oligonucleotide
  Mismatch hsa-miR-6889-5p MIMAT0027678
attccggacccctaactccccga

SEQ ID NO: 7411 - DNA, 22 bp, Artificial Sequence
  Synthetic oligonucleotide
  Mismatch hsa-miR-642b-3p MIMAT0018444
gggtccctctcttaatgtgtct

SEQ ID NO: 7412 - DNA, 22 bp, Artificial Sequence
  Synthetic oligonucleotide
  Mismatch hsa-miR-363-3p MIMAT0000707
tacagatggatttcgtgcaatt

SEQ ID NO: 7413 - DNA, 22 bp, Artificial Sequence
  Synthetic oligonucleotide
  Mismatch hsa-miR-3620-3p MIMAT0018001
ctgggtgcgggtcgcagggtga

SEQ ID NO: 7414 - DNA, 19 bp, Artificial Sequence
  Synthetic oligonucleotide
  Mismatch hsa-miR-4265 MIMAT0016891
cccagagccaagcccacag

SEQ ID NO: 7415 - DNA, 22 bp, Artificial Sequence
  Synthetic oligonucleotide
  Mismatch hsa-miR-6869-5p MIMAT0027638
gccgccgcgcgttactactcac

SEQ ID NO: 7416 - DNA, 22 bp, Artificial Sequence
  Synthetic oligonucleotide
  Mismatch hsa-miR-3154 MIMAT0015028
tctgctcccaatcccccttctg

SEQ ID NO: 7417 - DNA, 26 bp, Artificial Sequence
  Synthetic oligonucleotide
  Mismatch hsa-miR-4685-5p MIMAT0019771
aaccttgccccactcttagccctggg

SEQ ID NO: 7418 - DNA, 22 bp, Artificial Sequence
  Synthetic oligonucleotide
  Mismatch hsa-miR-6853-3p MIMAT0027607
ctgcgcagggtctcaatgaaca

SEQ ID NO: 7419 - DNA, 22 bp, Artificial Sequence
  Synthetic oligonucleotide
  Mismatch hsa-miR-4520-3p MIMAT0019057
ttcctgcgtgtcctctgtccaa

SEQ ID NO: 7420 - DNA, 24 bp, Artificial Sequence
  Synthetic oligonucleotide
  Mismatch hsa-miR-3978 MIMAT0019363
acaccctggatgctcgctttccac

SEQ ID NO: 7421 - DNA, 22 bp, Artificial Sequence
  Synthetic oligonucleotide
  Mismatch hsa-miR-493-5p MIMAT0002813
aatgaaagcctttcatgtacaa

SEQ ID NO: 7422 - DNA, 24 bp, Artificial Sequence
  Synthetic oligonucleotide
  Mismatch hsa-miR-5683 MIMAT0022472
gaagtcagagaattcgcatctgta

SEQ ID NO: 7423 - DNA, 21 bp, Artificial Sequence
  Synthetic oligonucleotide
  Mismatch hsa-miR-629-5p MIMAT0004810
agttctcccattgtaaaccca

SEQ ID NO: 7424 - DNA, 22 bp, Artificial Sequence
  Synthetic oligonucleotide
  Mismatch hsa-miR-4675 MIMAT0019757
cctgctggtcatccacagcccc

SEQ ID NO: 7425 - DNA, 23 bp, Artificial Sequence
  Synthetic oligonucleotide
  Mismatch hsa-miR-6776-3p MIMAT0027453
ctggggagagactatggtggttg

SEQ ID NO: 7426 - DNA, 22 bp, Artificial Sequence
  Synthetic oligonucleotide
  Mismatch hsa-miR-4423-5p MIMAT0019232
gcatgggaacattaaggcaact

SEQ ID NO: 7427 - DNA, 24 bp, Artificial Sequence
  Synthetic oligonucleotide
  Mismatch hsa-miR-5009-5p MIMAT0021041
atccccaaatctgttaaagtccaa

SEQ ID NO: 7428 - DNA, 21 bp, Artificial Sequence
  Synthetic oligonucleotide
  Mismatch hsa-miR-6780b-3p MIMAT0027573
ctagggaaagatgacaaggga

SEQ ID NO: 7429 - DNA, 22 bp, Artificial Sequence
  Synthetic oligonucleotide
  Mismatch hsa-miR-655-3p MIMAT0003331
aaagaggttaattatgtattat

SEQ ID NO: 7430 - DNA, 23 bp, Artificial Sequence
  Synthetic oligonucleotide
  Mismatch hsa-miR-181d-5p MIMAT0002821
acccaccgacaattatgaatgtt

SEQ ID NO: 7431 - DNA, 17 bp, Artificial Sequence
  Synthetic oligonucleotide
  Mismatch hsa-miR-4443 MIMAT0018961
aaaaccttcgcctccaa

SEQ ID NO: 7432 - DNA, 22 bp, Artificial Sequence
  Synthetic oligonucleotide
  Mismatch hsa-miR-4528 MIMAT0019067
gtccagatcatttatataatga

SEQ ID NO: 7433 - DNA, 21 bp, Artificial Sequence
  Synthetic oligonucleotide
  Mismatch hsa-miR-2116-3p MIMAT0011161
gggagttcttaacatgggagg

SEQ ID NO: 7434 - DNA, 21 bp, Artificial Sequence
  Synthetic oligonucleotide
  Mismatch hsa-miR-6895-5p MIMAT0027690
cttactctgtatctggccctg

SEQ ID NO: 7435 - DNA, 22 bp, Artificial Sequence
  Synthetic oligonucleotide
  Mismatch hsa-miR-22-5p MIMAT0004495
taaagcttgcctttgaagaact

SEQ ID NO: 7436 - DNA, 23 bp, Artificial Sequence
  Synthetic oligonucleotide
  Mismatch hsa-miR-3190-3p MIMAT0022839
tctctggccgtcctccttccaca

SEQ ID NO: 7437 - DNA, 21 bp, Artificial Sequence
  Synthetic oligonucleotide
  Mismatch hsa-miR-548m MIMAT0005917
caaaaaccacttatacctttg

SEQ ID NO: 7438 - DNA, 22 bp, Artificial Sequence
  Synthetic oligonucleotide
  Mismatch hsa-miR-18b-3p MIMAT0004751
gccagaaggggtttttagggca

SEQ ID NO: 7439 - DNA, 22 bp, Artificial Sequence
  Synthetic oligonucleotide
  Mismatch hsa-miR-28-5p MIMAT0000085
ctcaatagactacgagctcctt

SEQ ID NO: 7440 - DNA, 19 bp, Artificial Sequence
  Synthetic oligonucleotide
  Mismatch hsa-miR-6070 MIMAT0023695
ctccagggtttggaaccgg

SEQ ID NO: 7441 - DNA, 21 bp, Artificial Sequence
  Synthetic oligonucleotide
  Mismatch hsa-miR-323a-3p MIMAT0000755
agaggtcgactatgtaatgtg

SEQ ID NO: 7442 - DNA, 22 bp, Artificial Sequence
  Synthetic oligonucleotide
  Mismatch hsa-miR-8068 MIMAT0030995
acaacgatcctctcaacaaaca

SEQ ID NO: 7443 - DNA, 22 bp, Artificial Sequence
  Synthetic oligonucleotide
  Mismatch hsa-miR-3173-3p MIMAT0015048
tggcctgcctacctcctccttt

SEQ ID NO: 7444 - DNA, 22 bp, Artificial Sequence
  Synthetic oligonucleotide
  Mismatch hsa-miR-6861-5p MIMAT0027623
cctggagccccttctacccagt

SEQ ID NO: 7445 - DNA, 23 bp, Artificial Sequence
  Synthetic oligonucleotide
  Mismatch hsa-miR-6767-5p MIMAT0027434
tctccatgtgtctttgtctgcga

SEQ ID NO: 7446 - DNA, 21 bp, Artificial Sequence
  Synthetic oligonucleotide
  Mismatch hsa-miR-8061 MIMAT0030988
aacaatatcccttaatctaag

SEQ ID NO: 7447 - DNA, 22 bp, Artificial Sequence
  Synthetic oligonucleotide
  Mismatch hsa-miR-519c-3p MIMAT0002832
atcctctaaaataatgcacttt

SEQ ID NO: 7448 - DNA, 21 bp, Artificial Sequence
  Synthetic oligonucleotide
  Mismatch hsa-miR-6785-3p MIMAT0027471
ctggggaaggcagggcgatgt

SEQ ID NO: 7449 - DNA, 21 bp, Artificial Sequence
  Synthetic oligonucleotide
  Mismatch hsa-miR-129-5p MIMAT0000242
gcaagcccagttcgcaaaaag

SEQ ID NO: 7450 - DNA, 22 bp, Artificial Sequence
  Synthetic oligonucleotide
  Mismatch hsa-miR-1295b-3p MIMAT0022294
ttgcccagatctatggcctatt

SEQ ID NO: 7451 - DNA, 22 bp, Artificial Sequence
  Synthetic oligonucleotide
  Mismatch hsa-miR-4733-5p MIMAT0019857
caccgggtctaatattgggatt

SEQ ID NO: 7452 - DNA, 19 bp, Artificial Sequence
  Synthetic oligonucleotide
  Mismatch hsa-miR-7159-3p MIMAT0028229
cttccaacctacatagaaa

SEQ ID NO: 7453 - DNA, 22 bp, Artificial Sequence
  Synthetic oligonucleotide
  Mismatch hsa-miR-3136-3p MIMAT0019203
actaactgaattagttgggcca

SEQ ID NO: 7454 - DNA, 25 bp, Artificial Sequence
  Synthetic oligonucleotide
  Mismatch hsa-miR-658 MIMAT0003336
accaacggacctacccccctccgcc

SEQ ID NO: 7455 - DNA, 24 bp, Artificial Sequence
  Synthetic oligonucleotide
  Mismatch hsa-miR-182-5p MIMAT0000259
agtgtgagttctattattgccaaa

SEQ ID NO: 7456 - DNA, 21 bp, Artificial Sequence
  Synthetic oligonucleotide
  Mismatch hsa-miR-548ak MIMAT0019013
tcaaaaaccgttgttactttt

SEQ ID NO: 7457 - DNA, 21 bp, Artificial Sequence
  Synthetic oligonucleotide
  Mismatch hsa-miR-5588-5p MIMAT0022295
aaaagtcccatcaatgccagt

SEQ ID NO: 7458 - DNA, 25 bp, Artificial Sequence
  Synthetic oligonucleotide
  Mismatch hsa-miR-3143 MIMAT0015012
cgaaagaagcgcttctcaatgttat

SEQ ID NO: 7459 - DNA, 22 bp, Artificial Sequence
  Synthetic oligonucleotide
  Mismatch hsa-miR-504-5p MIMAT0002875
gatagagtgcaatccagggtct

SEQ ID NO: 7460 - DNA, 22 bp, Artificial Sequence
  Synthetic oligonucleotide
  Mismatch hsa-miR-411-3p MIMAT0004813
ggttagtggactatgttacata

SEQ ID NO: 7461 - DNA, 22 bp, Artificial Sequence
  Synthetic oligonucleotide
  Mismatch hsa-miR-4439 MIMAT0018957
atgcctccaagacatcagtcac

SEQ ID NO: 7462 - DNA, 22 bp, Artificial Sequence
  Synthetic oligonucleotide
  Mismatch hsa-miR-7111-3p MIMAT0028120
ctgggaggaggatagagaggat

SEQ ID NO: 7463 - DNA, 23 bp, Artificial Sequence
  Synthetic oligonucleotide
  Mismatch hsa-miR-6727-5p MIMAT0027355
cgctcccagccgtttgccccgag

SEQ ID NO: 7464 - DNA, 21 bp, Artificial Sequence
  Synthetic oligonucleotide
  Mismatch hsa-miR-514a-3p MIMAT0002883
tctactcacaatagtgtcaat

SEQ ID NO: 7465 - DNA, 21 bp, Artificial Sequence
  Synthetic oligonucleotide
  Mismatch hsa-miR-4672 MIMAT0019754
tgcctctgtcttgctgtgtaa

SEQ ID NO: 7466 - DNA, 22 bp, Artificial Sequence
  Synthetic oligonucleotide
  Mismatch hsa-miR-4714-3p MIMAT0019823
caactctgaccttctaggttgg

SEQ ID NO: 7467 - DNA, 22 bp, Artificial Sequence
  Synthetic oligonucleotide
  Mismatch hsa-miR-4753-3p MIMAT0019891
acacaaggctattgaaagagaa

SEQ ID NO: 7468 - DNA, 18 bp, Artificial Sequence
  Synthetic oligonucleotide
  Mismatch hsa-miR-1825 MIMAT0006765
ggagaggtaggcactgga

SEQ ID NO: 7469 - DNA, 22 bp, Artificial Sequence
  Synthetic oligonucleotide
  Mismatch hsa-miR-3925-5p MIMAT0018200
aggctccacttctagttctctt

SEQ ID NO: 7470 - DNA, 22 bp, Artificial Sequence
  Synthetic oligonucleotide
  Mismatch hsa-miR-132-5p MIMAT0004594
agtaacaatcgttagccacggt

SEQ ID NO: 7471 - DNA, 21 bp, Artificial Sequence
  Synthetic oligonucleotide
  Mismatch hsa-miR-6509-5p MIMAT0025474
gttccactgcttctacctaat

SEQ ID NO: 7472 - DNA, 22 bp, Artificial Sequence
  Synthetic oligonucleotide
  Mismatch hsa-miR-4699-5p MIMAT0019794
ggaacttactccacaatcttct

SEQ ID NO: 7473 - DNA, 20 bp, Artificial Sequence
  Synthetic oligonucleotide
  Mismatch hsa-miR-5787 MIMAT0023252
acctccccgtaccccagccc

SEQ ID NO: 7474 - DNA, 22 bp, Artificial Sequence
  Synthetic oligonucleotide
  Mismatch hsa-miR-1909-3p MIMAT0007883
cggtgagcacctagcccctgcg

SEQ ID NO: 7475 - DNA, 23 bp, Artificial Sequence
  Synthetic oligonucleotide
  Mismatch hsa-miR-30c-5p MIMAT0000244
gctgagagtgtaaaatgtttaca

SEQ ID NO: 7476 - DNA, 22 bp, Artificial Sequence
  Synthetic oligonucleotide
  Mismatch hsa-miR-455-5p MIMAT0003150
cgatgtagtccttaggcacata

SEQ ID NO: 7477 - DNA, 21 bp, Artificial Sequence
  Synthetic oligonucleotide
  Mismatch hsa-miR-4761-3p MIMAT0019909
ggacaaagtgtacatgccctc

SEQ ID NO: 7478 - DNA, 22 bp, Artificial Sequence
  Synthetic oligonucleotide
  Mismatch hsa-miR-4760-3p MIMAT0019907
ggtttagattgttcatgaattt

SEQ ID NO: 7479 - DNA, 22 bp, Artificial Sequence
  Synthetic oligonucleotide
  Mismatch hsa-miR-5585-3p MIMAT0022286
acctgtagtccttgctattcag

SEQ ID NO: 7480 - DNA, 22 bp, Artificial Sequence
  Synthetic oligonucleotide
  Mismatch hsa-miR-6893-3p MIMAT0027687
ctggcaggtgatagcagcaggg

SEQ ID NO: 7481 - DNA, 20 bp, Artificial Sequence
  Synthetic oligonucleotide
  Mismatch hsa-miR-6889-3p MIMAT0027679
ctgggaagttagggcacaga

SEQ ID NO: 7482 - DNA, 20 bp, Artificial Sequence
  Synthetic oligonucleotide
  Mismatch hsa-miR-1911-3p MIMAT0007886
ggagaccactttgcctggtg

SEQ ID NO: 7483 - DNA, 22 bp, Artificial Sequence
  Synthetic oligonucleotide
  Mismatch hsa-miR-195-3p MIMAT0004615
ggagcagcacaatcaatattgg

SEQ ID NO: 7484 - DNA, 22 bp, Artificial Sequence
  Synthetic oligonucleotide
  Mismatch hsa-miR-1303 MIMAT0005891
agagcaagaccttgtctctaaa

SEQ ID NO: 7485 - DNA, 23 bp, Artificial Sequence
  Synthetic oligonucleotide
  Mismatch hsa-miR-5589-3p MIMAT0022298
tgggagctaggtcaccatgtgca

SEQ ID NO: 7486 - DNA, 21 bp, Artificial Sequence
  Synthetic oligonucleotide
  Mismatch hsa-miR-4649-3p MIMAT0019712
tggggagaggttggcctcaga

SEQ ID NO: 7487 - DNA, 23 bp, Artificial Sequence
  Synthetic oligonucleotide
  Mismatch hsa-miR-548aj-5p MIMAT0022739
caaaaactgcaaccacttttgca

SEQ ID NO: 7488 - DNA, 22 bp, Artificial Sequence
  Synthetic oligonucleotide
  Mismatch hsa-miR-4747-3p MIMAT0019883
ctgggaggaaaatccgggcctt

SEQ ID NO: 7489 - DNA, 28 bp, Artificial Sequence
  Synthetic oligonucleotide
  Mismatch hsa-miR-7161-3p MIMAT0028233
cctggagactgccagagctaaagatcta

SEQ ID NO: 7490 - DNA, 21 bp, Artificial Sequence
  Synthetic oligonucleotide
  Mismatch hsa-miR-1295a MIMAT0005885
tcacccagattcgcggcctaa

SEQ ID NO: 7491 - DNA, 22 bp, Artificial Sequence
  Synthetic oligonucleotide
  Mismatch hsa-miR-376b-5p MIMAT0022923
aaacatagaagatatatccacg

SEQ ID NO: 7492 - DNA, 22 bp, Artificial Sequence
  Synthetic oligonucleotide
  Mismatch hsa-miR-4637 MIMAT0019694
tcacttgaatccacagttagta

SEQ ID NO: 7493 - DNA, 21 bp, Artificial Sequence
  Synthetic oligonucleotide
  Mismatch hsa-miR-6800-5p MIMAT0027500
ccgcccctgatcgtcacctac

SEQ ID NO: 7494 - DNA, 22 bp, Artificial Sequence
  Synthetic oligonucleotide
  Mismatch hsa-miR-506-5p MIMAT0022701
ttaagtaacactctcctgaata

SEQ ID NO: 7495 - DNA, 23 bp, Artificial Sequence
  Synthetic oligonucleotide
  Mismatch hsa-miR-1182 MIMAT0005827
gtcacatccctcttaagaccctc

SEQ ID NO: 7496 - DNA, 22 bp, Artificial Sequence
  Synthetic oligonucleotide
  Mismatch hsa-miR-653-3p MIMAT0026625
tattgaaacaatttccagtgaa

SEQ ID NO: 7497 - DNA, 22 bp, Artificial Sequence
  Synthetic oligonucleotide
  Mismatch hsa-miR-6871-3p MIMAT0027643
ctgtgggagccttagggtgctg

SEQ ID NO: 7498 - DNA, 22 bp, Artificial Sequence
  Synthetic oligonucleotide
  Mismatch hsa-miR-299-5p MIMAT0002890
atgtatgtgggttggtaaacca

SEQ ID NO: 7499 - DNA, 22 bp, Artificial Sequence
  Synthetic oligonucleotide
  Mismatch hsa-miR-6803-5p MIMAT0027506
acgcccagcccttcacccccag

SEQ ID NO: 7500 - DNA, 22 bp, Artificial Sequence
  Synthetic oligonucleotide
  Mismatch hsa-miR-548p MIMAT0005934
aaagtaactgctatttttgcta

SEQ ID NO: 7501 - DNA, 21 bp, Artificial Sequence
  Synthetic oligonucleotide
  Mismatch hsa-miR-4470 MIMAT0018997
tctcggcttcttcgtttgcca

SEQ ID NO: 7502 - DNA, 21 bp, Artificial Sequence
  Synthetic oligonucleotide
  Mismatch hsa-miR-6788-5p MIMAT0027476
tcttcaccacctttctcccag

SEQ ID NO: 7503 - DNA, 21 bp, Artificial Sequence
  Synthetic oligonucleotide
  Mismatch hsa-miR-1203 MIMAT0005866
gagctgcatctcggctccggg

SEQ ID NO: 7504 - DNA, 24 bp, Artificial Sequence
  Synthetic oligonucleotide
  Mismatch hsa-miR-3137 MIMAT0015005
accccattgctccttggctacaga

SEQ ID NO: 7505 - DNA, 22 bp, Artificial Sequence
  Synthetic oligonucleotide
  Mismatch hsa-miR-615-3p MIMAT0003283
aagagggagacttaggctcgga

SEQ ID NO: 7506 - DNA, 22 bp, Artificial Sequence
  Synthetic oligonucleotide
  Mismatch hsa-miR-1185-2-3p MIMAT0022713
atgagagtctcttcctgtatat

SEQ ID NO: 7507 - DNA, 22 bp, Artificial Sequence
  Synthetic oligonucleotide
  Mismatch hsa-miR-5691 MIMAT0022483
gctttctcggaattcagagcaa

SEQ ID NO: 7508 - DNA, 19 bp, Artificial Sequence
  Synthetic oligonucleotide
  Mismatch hsa-miR-6776-5p MIMAT0027452
aacccccatcgcacccaga

SEQ ID NO: 7509 - DNA, 22 bp, Artificial Sequence
  Synthetic oligonucleotide
  Mismatch hsa-miR-548ad-3p MIMAT0018946
tgcaaaagtcaccgtcgttttc

SEQ ID NO: 7510 - DNA, 22 bp, Artificial Sequence
  Synthetic oligonucleotide
  Mismatch hsa-miR-524-5p MIMAT0002849
gagaaagtgctctcctttgtag

SEQ ID NO: 7511 - DNA, 22 bp, Artificial Sequence
  Synthetic oligonucleotide
  Mismatch hsa-miR-3685 MIMAT0018113
agtcttcaggttaggtaggaaa

SEQ ID NO: 7512 - DNA, 18 bp, Artificial Sequence
  Synthetic oligonucleotide
  Mismatch hsa-miR-7977 MIMAT0031180
tggtgcgccggctgggaa

SEQ ID NO: 7513 - DNA, 22 bp, Artificial Sequence
  Synthetic oligonucleotide
  Mismatch hsa-miR-4787-5p MIMAT0019956
gggatgccgccatcacccccgc

SEQ ID NO: 7514 - DNA, 22 bp, Artificial Sequence
  Synthetic oligonucleotide
  Mismatch hsa-miR-519d-3p MIMAT0002853
cactctaaaggatggcactttg

SEQ ID NO: 7515 - DNA, 23 bp, Artificial Sequence
  Synthetic oligonucleotide
  Mismatch hsa-miR-449c-3p MIMAT0013771
acagagaggagtataactagcaa

SEQ ID NO: 7516 - DNA, 22 bp, Artificial Sequence
  Synthetic oligonucleotide
  Mismatch hsa-miR-5581-3p MIMAT0022276
ggaacttctagatggcatggaa

SEQ ID NO: 7517 - DNA, 22 bp, Artificial Sequence
  Synthetic oligonucleotide
  Mismatch hsa-miR-10b-3p MIMAT0004556
attcccctagatccgaatctgt

SEQ ID NO: 7518 - DNA, 22 bp, Artificial Sequence
  Synthetic oligonucleotide
  Mismatch hsa-miR-454-5p MIMAT0003884
gcagagacaattctgatagggt

SEQ ID NO: 7519 - DNA, 22 bp, Artificial Sequence
  Synthetic oligonucleotide
  Mismatch hsa-miR-548ay-3p MIMAT0025453
tgcaagagtaactgcggttttg

SEQ ID NO: 7520 - DNA, 22 bp, Artificial Sequence
  Synthetic oligonucleotide
  Mismatch hsa-miR-5579-3p MIMAT0022270
gatctggtactttttaagctaa

SEQ ID NO: 7521 - DNA, 17 bp, Artificial Sequence
  Synthetic oligonucleotide
  Mismatch hsa-miR-4451 MIMAT0018973
tgtcctttgctctacca

SEQ ID NO: 7522 - DNA, 22 bp, Artificial Sequence
  Synthetic oligonucleotide
  Mismatch hsa-miR-5100 MIMAT0022259
agaggcaccgccaggatctgaa

SEQ ID NO: 7523 - DNA, 22 bp, Artificial Sequence
  Synthetic oligonucleotide
  Mismatch hsa-miR-1273e MIMAT0018079
tccacttcctgaattcaagcaa

SEQ ID NO: 7524 - DNA, 22 bp, Artificial Sequence
  Synthetic oligonucleotide
  Mismatch hsa-miR-337-3p MIMAT0000754
gaagaaaggcactatataggag

SEQ ID NO: 7525 - DNA, 22 bp, Artificial Sequence
  Synthetic oligonucleotide
  Mismatch hsa-miR-92a-3p MIMAT0000092
acaggccgggattagtgcaata

SEQ ID NO: 7526 - DNA, 21 bp, Artificial Sequence
  Synthetic oligonucleotide
  Mismatch hsa-miR-6852-5p MIMAT0027604
catgtcctcaataccccaggg

SEQ ID NO: 7527 - DNA, 24 bp, Artificial Sequence
  Synthetic oligonucleotide
  Mismatch hsa-miR-4763-3p MIMAT0019913
cccgcccagcacctacccctgcct

SEQ ID NO: 7528 - DNA, 17 bp, Artificial Sequence
  Synthetic oligonucleotide
  Mismatch hsa-miR-302f MIMAT0005932
aaacataaaagcaatta

SEQ ID NO: 7529 - DNA, 22 bp, Artificial Sequence
  Synthetic oligonucleotide
  Mismatch hsa-miR-660-5p MIMAT0003338
caactccgatacacaatgggta

SEQ ID NO: 7530 - DNA, 22 bp, Artificial Sequence
  Synthetic oligonucleotide
  Mismatch hsa-miR-548i MIMAT0005935
ggcaaaatccgttattactttt

SEQ ID NO: 7531 - DNA, 24 bp, Artificial Sequence
  Synthetic oligonucleotide
  Mismatch hsa-miR-6089 MIMAT0023714
ccgccccgccccattccggcctcc

SEQ ID NO: 7532 - DNA, 21 bp, Artificial Sequence
  Synthetic oligonucleotide
  Mismatch hsa-miR-520a-5p MIMAT0002833
agaaagtactctcctctggag

SEQ ID NO: 7533 - DNA, 22 bp, Artificial Sequence
  Synthetic oligonucleotide
  Mismatch hsa-miR-4533 MIMAT0019072
agcgtccggcattctccttcca

SEQ ID NO: 7534 - DNA, 23 bp, Artificial Sequence
  Synthetic oligonucleotide
  Mismatch hsa-miR-7153-5p MIMAT0028216
cctaccacatttaccagttctca

SEQ ID NO: 7535 - DNA, 21 bp, Artificial Sequence
  Synthetic oligonucleotide
  Mismatch hsa-miR-151a-3p MIMAT0000757
cctcaaggagtctcagtctag

SEQ ID NO: 7536 - DNA, 18 bp, Artificial Sequence
  Synthetic oligonucleotide
  Mismatch hsa-miR-3155b MIMAT0019012
tcccactatagagcctgg

SEQ ID NO: 7537 - DNA, 22 bp, Artificial Sequence
  Synthetic oligonucleotide
  Mismatch hsa-miR-3941 MIMAT0018357
tatgatcctcaactgtgtgtaa

SEQ ID NO: 7538 - DNA, 22 bp, Artificial Sequence
  Synthetic oligonucleotide
  Mismatch hsa-miR-200c-5p MIMAT0004657
ccaaacactgccaggtaagacg

SEQ ID NO: 7539 - DNA, 18 bp, Artificial Sequence
  Synthetic oligonucleotide
  Mismatch hsa-miR-1178-5p MIMAT0022940
catgctctactgaccctg

SEQ ID NO: 7540 - DNA, 22 bp, Artificial Sequence
  Synthetic oligonucleotide
  Mismatch hsa-miR-26b-3p MIMAT0004500
gagccaagtaacagagaacagg

SEQ ID NO: 7541 - DNA, 22 bp, Artificial Sequence
  Synthetic oligonucleotide
  Mismatch hsa-miR-8077 MIMAT0031004
ggagtcagaacttcactcagcc

SEQ ID NO: 7542 - DNA, 21 bp, Artificial Sequence
  Synthetic oligonucleotide
  Mismatch hsa-miR-1468-5p MIMAT0006789
cagcgaaacaaacaaacggag

SEQ ID NO: 7543 - DNA, 21 bp, Artificial Sequence
  Synthetic oligonucleotide
  Mismatch hsa-miR-6715b-5p MIMAT0025842
tgccaaaccaaccgtgcctgt

SEQ ID NO: 7544 - DNA, 22 bp, Artificial Sequence
  Synthetic oligonucleotide
  Mismatch hsa-miR-523-5p MIMAT0005449
cagaaagcgctctcctctagag

SEQ ID NO: 7545 - DNA, 20 bp, Artificial Sequence
  Synthetic oligonucleotide
  Mismatch hsa-miR-6794-3p MIMAT0027489
agggagggatcgagagtgag

SEQ ID NO: 7546 - DNA, 22 bp, Artificial Sequence
  Synthetic oligonucleotide
  Mismatch hsa-miR-4796-3p MIMAT0019971
gtgtctatacttcgccacttta

SEQ ID NO: 7547 - DNA, 17 bp, Artificial Sequence
  Synthetic oligonucleotide
  Mismatch hsa-miR-4262 MIMAT0016894
caggtaacctgaatgtc

SEQ ID NO: 7548 - DNA, 22 bp, Artificial Sequence
  Synthetic oligonucleotide
  Mismatch hsa-miR-582-3p MIMAT0004797
ggttcagttgtctaaccagtta

SEQ ID NO: 7549 - DNA, 21 bp, Artificial Sequence
  Synthetic oligonucleotide
  Mismatch hsa-miR-4433a-3p MIMAT0018949
atgtcccaccttcactcctgt

SEQ ID NO: 7550 - DNA, 22 bp, Artificial Sequence
  Synthetic oligonucleotide
  Mismatch hsa-miR-106b-3p MIMAT0004672
gcagcaagtacttacagtgcgg

SEQ ID NO: 7551 - DNA, 21 bp, Artificial Sequence
  Synthetic oligonucleotide
  Mismatch hsa-miR-6854-3p MIMAT0027609
ctgctcaagaaaagaaacgca

SEQ ID NO: 7552 - DNA, 21 bp, Artificial Sequence
  Synthetic oligonucleotide
  Mismatch hsa-miR-5571-5p MIMAT0022257
gggaggctcccctgagaattg

SEQ ID NO: 7553 - DNA, 22 bp, Artificial Sequence
  Synthetic oligonucleotide
  Mismatch hsa-miR-3148 MIMAT0015021
aagcacacacctattttttcca

SEQ ID NO: 7554 - DNA, 22 bp, Artificial Sequence
  Synthetic oligonucleotide
  Mismatch hsa-miR-433-5p MIMAT0026554
gaataatgacaaactcaccgta

SEQ ID NO: 7555 - DNA, 22 bp, Artificial Sequence
  Synthetic oligonucleotide
  Mismatch hsa-miR-1269b MIMAT0019059
ccagtagcatgattcagtccag

SEQ ID NO: 7556 - DNA, 22 bp, Artificial Sequence
  Synthetic oligonucleotide
  Mismatch hsa-miR-4762-3p MIMAT0019911
caccacaaatcccgatcagaag

SEQ ID NO: 7557 - DNA, 22 bp, Artificial Sequence
  Synthetic oligonucleotide
  Mismatch hsa-miR-942-5p MIMAT0004985
cacatggccaattcagagaaga

SEQ ID NO: 7558 - DNA, 20 bp, Artificial Sequence
  Synthetic oligonucleotide
  Mismatch hsa-miR-4324 MIMAT0016876
ttaaggttaaagtctcaggg

SEQ ID NO: 7559 - DNA, 22 bp, Artificial Sequence
  Synthetic oligonucleotide
  Mismatch hsa-miR-129-2-3p MIMAT0004605
atgctttttggaataagggctt

SEQ ID NO: 7560 - DNA, 21 bp, Artificial Sequence
  Synthetic oligonucleotide
  Mismatch hsa-miR-6739-3p MIMAT0027380
ctgggagaaaatcagaacaat

SEQ ID NO: 7561 - DNA, 23 bp, Artificial Sequence
  Synthetic oligonucleotide
  Mismatch hsa-miR-3177-5p MIMAT0019215
agcgcctggcacacgtgtacaca

SEQ ID NO: 7562 - DNA, 17 bp, Artificial Sequence
  Synthetic oligonucleotide
  Mismatch hsa-miR-4492 MIMAT0019027
ggcgcgtacccagcccc

SEQ ID NO: 7563 - DNA, 22 bp, Artificial Sequence
  Synthetic oligonucleotide
  Mismatch hsa-miR-4779 MIMAT0019938
ctgcttttacttctccctccta

SEQ ID NO: 7564 - DNA, 22 bp, Artificial Sequence
  Synthetic oligonucleotide
  Mismatch hsa-miR-3126-3p MIMAT0015377
tctgtgtgacgattgccagatg

SEQ ID NO: 7565 - DNA, 23 bp, Artificial Sequence
  Synthetic oligonucleotide
  Mismatch hsa-miR-6760-5p MIMAT0027420
tctgcacttccattttctccctg

SEQ ID NO: 7566 - DNA, 22 bp, Artificial Sequence
  Synthetic oligonucleotide
  Mismatch hsa-miR-5001-3p MIMAT0021022
aaggacctggattgaggcagaa

SEQ ID NO: 7567 - DNA, 24 bp, Artificial Sequence
  Synthetic oligonucleotide
  Mismatch hsa-miR-3145-3p MIMAT0015016
caattccaaacacctaaaatatct

SEQ ID NO: 7568 - DNA, 22 bp, Artificial Sequence
  Synthetic oligonucleotide
  Mismatch hsa-miR-7109-3p MIMAT0028116
ctggaagggcaaaagaggcttg

SEQ ID NO: 7569 - DNA, 22 bp, Artificial Sequence
  Synthetic oligonucleotide
  Mismatch hsa-miR-4670-5p MIMAT0019750
tgaagttacattttggtcgctt

SEQ ID NO: 7570 - DNA, 22 bp, Artificial Sequence
  Synthetic oligonucleotide
  Mismatch hsa-miR-98-5p MIMAT0000096
aacaatacaacccactacctca

SEQ ID NO: 7571 - DNA, 22 bp, Artificial Sequence
  Synthetic oligonucleotide
  Mismatch hsa-miR-6827-5p MIMAT0027554
gcacagacccttttggctccca

SEQ ID NO: 7572 - DNA, 22 bp, Artificial Sequence
  Synthetic oligonucleotide
  Mismatch hsa-miR-29a-3p MIMAT0000086
taaccgatttctaatggtgcta

SEQ ID NO: 7573 - DNA, 23 bp, Artificial Sequence
  Synthetic oligonucleotide
  Mismatch hsa-miR-7113-3p MIMAT0028124
ctgcagagaggcaagcagggagg

SEQ ID NO: 7574 - DNA, 24 bp, Artificial Sequence
  Synthetic oligonucleotide
  Mismatch hsa-miR-362-5p MIMAT0000705
actcacacctaggccccaaggatt

SEQ ID NO: 7575 - DNA, 21 bp, Artificial Sequence
  Synthetic oligonucleotide
  Mismatch hsa-miR-1286 MIMAT0005877
agggctcatcccggtcctgca

SEQ ID NO: 7576 - DNA, 22 bp, Artificial Sequence
  Synthetic oligonucleotide
  Mismatch hsa-miR-505-3p MIMAT0002876
aggaaaccagcttgtgttgacg

SEQ ID NO: 7577 - DNA, 23 bp, Artificial Sequence
  Synthetic oligonucleotide
  Mismatch hsa-miR-3675-5p MIMAT0018098
gaaatctctacaatagccccata

SEQ ID NO: 7578 - DNA, 22 bp, Artificial Sequence
  Synthetic oligonucleotide
  Mismatch hsa-miR-7855-5p MIMAT0030430
ccgagcttgggaccctcaccaa

SEQ ID NO: 7579 - DNA, 22 bp, Artificial Sequence
  Synthetic oligonucleotide
  Mismatch hsa-miR-15a-5p MIMAT0000068
cacaaaccatttcgtgctgcta

SEQ ID NO: 7580 - DNA, 22 bp, Artificial Sequence
  Synthetic oligonucleotide
  Mismatch hsa-miR-548as-5p MIMAT0022267
ggcaaaacccgttattactttt

SEQ ID NO: 7581 - DNA, 22 bp, Artificial Sequence
  Synthetic oligonucleotide
  Mismatch hsa-miR-642b-5p MIMAT0022736
agacacatttgatgagggaacc

SEQ ID NO: 7582 - DNA, 24 bp, Artificial Sequence
  Synthetic oligonucleotide
  Mismatch hsa-miR-619-3p MIMAT0003288
actgggcacaaactcgtccaggtc

SEQ ID NO: 7583 - DNA, 20 bp, Artificial Sequence
  Synthetic oligonucleotide
  Mismatch hsa-miR-550a-3-5p MIMAT0020925
ctcttactctttcaggcact

SEQ ID NO: 7584 - DNA, 20 bp, Artificial Sequence
  Synthetic oligonucleotide
  Mismatch hsa-miR-3622b-5p MIMAT0018005
tcacctgactccccatgcct

SEQ ID NO: 7585 - DNA, 23 bp, Artificial Sequence
  Synthetic oligonucleotide
  Mismatch hsa-miR-6777-5p MIMAT0027454
tccaccactgcccaactccccgt

SEQ ID NO: 7586 - DNA, 22 bp, Artificial Sequence
  Synthetic oligonucleotide
  Mismatch hsa-miR-302d-5p MIMAT0004685
gcaagtgcctctttgttaaagt

SEQ ID NO: 7587 - DNA, 20 bp, Artificial Sequence
  Synthetic oligonucleotide
  Mismatch hsa-miR-147a MIMAT0000251
gcagaagcacctccacacac

SEQ ID NO: 7588 - DNA, 25 bp, Artificial Sequence
  Synthetic oligonucleotide
  Mismatch hsa-miR-1273a MIMAT0005926
aagaaagagtcttgtcttgtcgccc

SEQ ID NO: 7589 - DNA, 23 bp, Artificial Sequence
  Synthetic oligonucleotide
  Mismatch hsa-miR-432-5p MIMAT0002814
ccacccaatgactcactccaaga

SEQ ID NO: 7590 - DNA, 21 bp, Artificial Sequence
  Synthetic oligonucleotide
  Mismatch hsa-miR-204-3p MIMAT0022693
acgtccctttatcttcccagc

SEQ ID NO: 7591 - DNA, 23 bp, Artificial Sequence
  Synthetic oligonucleotide
  Mismatch hsa-miR-3663-3p MIMAT0018085
gcgcccggcctgcatggtgctca

SEQ ID NO: 7592 - DNA, 23 bp, Artificial Sequence
  Synthetic oligonucleotide
  Mismatch hsa-miR-5093 MIMAT0021085
gctcctagccagtttcatttcct

SEQ ID NO: 7593 - DNA, 22 bp, Artificial Sequence
  Synthetic oligonucleotide
  Mismatch hsa-miR-1913 MIMAT0007888
tggcagcagcgatgggggcaga

SEQ ID NO: 7594 - DNA, 22 bp, Artificial Sequence
  Synthetic oligonucleotide
  Mismatch hsa-miR-4529-5p MIMAT0019236
ttcattggactattgatggcct

SEQ ID NO: 7595 - DNA, 23 bp, Artificial Sequence
  Synthetic oligonucleotide
  Mismatch hsa-miR-4666b MIMAT0022485
gggaattacaattcgacatgcaa

SEQ ID NO: 7596 - DNA, 21 bp, Artificial Sequence
  Synthetic oligonucleotide
  Mismatch hsa-miR-6886-5p MIMAT0027672
agccctcatcctacctgcggg

SEQ ID NO: 7597 - DNA, 18 bp, Artificial Sequence
  Synthetic oligonucleotide
  Mismatch hsa-miR-4309 MIMAT0016859
tggaatctcagactccag

SEQ ID NO: 7598 - DNA, 24 bp, Artificial Sequence
  Synthetic oligonucleotide
  Mismatch hsa-miR-3184-5p MIMAT0015064
aaaagctcggtctatggcccctca

SEQ ID NO: 7599 - DNA, 20 bp, Artificial Sequence
  Synthetic oligonucleotide
  Mismatch hsa-miR-4633-5p MIMAT0019689
gaggagctaatcaggcatat

SEQ ID NO: 7600 - DNA, 19 bp, Artificial Sequence
  Synthetic oligonucleotide
  Mismatch hsa-miR-4290 MIMAT0016921
gagggaagttaggagggca

SEQ ID NO: 7601 - DNA, 22 bp, Artificial Sequence
  Synthetic oligonucleotide
  Mismatch hsa-miR-345-3p MIMAT0022698
ctccagaccccctgttcagggc

SEQ ID NO: 7602 - DNA, 19 bp, Artificial Sequence
  Synthetic oligonucleotide
  Mismatch hsa-miR-3176 MIMAT0015053
ccggtagtttcaggccagt

SEQ ID NO: 7603 - DNA, 21 bp, Artificial Sequence
  Synthetic oligonucleotide
  Mismatch hsa-miR-6824-3p MIMAT0027549
ctggggtggcttgaccagaga

SEQ ID NO: 7604 - DNA, 21 bp, Artificial Sequence
  Synthetic oligonucleotide
  Mismatch hsa-miR-502-5p MIMAT0002873
tagcacccagtcagcaaggat

SEQ ID NO: 7605 - DNA, 19 bp, Artificial Sequence
  Synthetic oligonucleotide
  Mismatch hsa-miR-7641 MIMAT0029782
gcttagctctcgagatcaa

SEQ ID NO: 7606 - DNA, 22 bp, Artificial Sequence
  Synthetic oligonucleotide
  Mismatch hsa-miR-1180-3p MIMAT0005825
acacacccacgtaagccggaaa

SEQ ID NO: 7607 - DNA, 21 bp, Artificial Sequence
  Synthetic oligonucleotide
  Mismatch hsa-miR-4464 MIMAT0018988
tattgcatcttcccaaacctt

SEQ ID NO: 7608 - DNA, 21 bp, Artificial Sequence
  Synthetic oligonucleotide
  Mismatch hsa-miR-5187-3p MIMAT0021118
ctgaggaaaaatggattcagt

SEQ ID NO: 7609 - DNA, 21 bp, Artificial Sequence
  Synthetic oligonucleotide
  Mismatch hsa-miR-3944-5p MIMAT0019231
tctcggttggtttgctgcaca

SEQ ID NO: 7610 - DNA, 23 bp, Artificial Sequence
  Synthetic oligonucleotide
  Mismatch hsa-miR-664a-3p MIMAT0005949
tgtaggctggggtcaaatgaata

SEQ ID NO: 7611 - DNA, 22 bp, Artificial Sequence
  Synthetic oligonucleotide
  Mismatch hsa-miR-548at-5p MIMAT0022277
agccaaaaccgttataactttt

SEQ ID NO: 7612 - DNA, 20 bp, Artificial Sequence
  Synthetic oligonucleotide
  Mismatch hsa-miR-591 MIMAT0003259
acaatgagattccatggtct

SEQ ID NO: 7613 - DNA, 22 bp, Artificial Sequence
  Synthetic oligonucleotide
  Mismatch hsa-miR-143-5p MIMAT0004599
accagagatgctacactgcacc

SEQ ID NO: 7614 - DNA, 22 bp, Artificial Sequence
  Synthetic oligonucleotide
  Mismatch hsa-miR-383-5p MIMAT0000738
agccacaatcattttctgatct

SEQ ID NO: 7615 - DNA, 22 bp, Artificial Sequence
  Synthetic oligonucleotide
  Mismatch hsa-miR-4753-5p MIMAT0019890
ctgttctcttctcttggccttg

SEQ ID NO: 7616 - DNA, 25 bp, Artificial Sequence
  Synthetic oligonucleotide
  Mismatch hsa-miR-6885-5p MIMAT0027670
ggctttgcttgcgctatgcccccct

SEQ ID NO: 7617 - DNA, 23 bp, Artificial Sequence
  Synthetic oligonucleotide
  Mismatch hsa-miR-503-5p MIMAT0002874
ctgcagaactgtctccgctgcta

SEQ ID NO: 7618 - DNA, 21 bp, Artificial Sequence
  Synthetic oligonucleotide
  Mismatch hsa-miR-6875-5p MIMAT0027650
tctcctgtcccaggtccctca

SEQ ID NO: 7619 - DNA, 22 bp, Artificial Sequence
  Synthetic oligonucleotide
  Mismatch hsa-miR-1234-3p MIMAT0005589
gtggggtgggtaatcaggccga

SEQ ID NO: 7620 - DNA, 22 bp, Artificial Sequence
  Synthetic oligonucleotide
  Mismatch hsa-miR-19a-5p MIMAT0004490
tgtagtgcaaccttgcaaaact

SEQ ID NO: 7621 - DNA, 21 bp, Artificial Sequence
  Synthetic oligonucleotide
  Mismatch hsa-miR-6779-5p MIMAT0027458
gccaaacccaatccctcccag

SEQ ID NO: 7622 - DNA, 20 bp, Artificial Sequence
  Synthetic oligonucleotide
  Mismatch hsa-miR-1233-3p MIMAT0005588
ctgcgggagatcagggctca

SEQ ID NO: 7623 - DNA, 23 bp, Artificial Sequence
  Synthetic oligonucleotide
  Mismatch hsa-miR-6769b-5p MIMAT0027620
gcacttctcctcttcacccacca

SEQ ID NO: 7624 - DNA, 22 bp, Artificial Sequence
  Synthetic oligonucleotide
  Mismatch hsa-miR-133a-5p MIMAT0026478
atttggttccaccttaccagct

SEQ ID NO: 7625 - DNA, 19 bp, Artificial Sequence
  Synthetic oligonucleotide
  Mismatch hsa-miR-2861 MIMAT0013802
ccgcccactaccaggcccc

SEQ ID NO: 7626 - DNA, 23 bp, Artificial Sequence
  Synthetic oligonucleotide
  Mismatch hsa-miR-6501-3p MIMAT0025459
actgttaccgcaaactgctctgg

SEQ ID NO: 7627 - DNA, 19 bp, Artificial Sequence
  Synthetic oligonucleotide
  Mismatch hsa-miR-1260b MIMAT0015041
atggtggctatggtgggat

SEQ ID NO: 7628 - DNA, 21 bp, Artificial Sequence
  Synthetic oligonucleotide
  Mismatch hsa-miR-4536-3p MIMAT0020959
atgtggtagacttatgcacga

SEQ ID NO: 7629 - DNA, 22 bp, Artificial Sequence
  Synthetic oligonucleotide
  Mismatch hsa-miR-185-3p MIMAT0004611
gaccagaggaataccagcccct

SEQ ID NO: 7630 - DNA, 21 bp, Artificial Sequence
  Synthetic oligonucleotide
  Mismatch hsa-miR-4529-3p MIMAT0019068
acgggccatctacagtccaat

SEQ ID NO: 7631 - DNA, 25 bp, Artificial Sequence
  Synthetic oligonucleotide
  Mismatch hsa-miR-1273d MIMAT0015090
actgcagcctcaactccatgggttc

SEQ ID NO: 7632 - DNA, 22 bp, Artificial Sequence
  Synthetic oligonucleotide
  Mismatch hsa-miR-1243 MIMAT0005894
cactcctataaccgatccagtt

SEQ ID NO: 7633 - DNA, 22 bp, Artificial Sequence
  Synthetic oligonucleotide
  Mismatch hsa-miR-4738-5p MIMAT0019866
atgaaactgaattcgcgctggt

SEQ ID NO: 7634 - DNA, 22 bp, Artificial Sequence
  Synthetic oligonucleotide
  Mismatch hsa-miR-761 MIMAT0010364
tgtgtcagtttttccctgctgc

SEQ ID NO: 7635 - DNA, 21 bp, Artificial Sequence
  Synthetic oligonucleotide
  Mismatch hsa-miR-5190 MIMAT0021121
tggctccagcctagtcactgg

SEQ ID NO: 7636 - DNA, 22 bp, Artificial Sequence
  Synthetic oligonucleotide
  Mismatch hsa-miR-6835-5p MIMAT0027570
cttcagccactccctaccccct

SEQ ID NO: 7637 - DNA, 21 bp, Artificial Sequence
  Synthetic oligonucleotide
  Mismatch hsa-miR-4712-3p MIMAT0019819
atacagtacaaatctctcatt

SEQ ID NO: 7638 - DNA, 21 bp, Artificial Sequence
  Synthetic oligonucleotide
  Mismatch hsa-miR-6750-3p MIMAT0027401
ctgggagcagtaggtgagttc

SEQ ID NO: 7639 - DNA, 21 bp, Artificial Sequence
  Synthetic oligonucleotide
  Mismatch hsa-miR-6778-3p MIMAT0027457
ctgtggaatgctagggaggca

SEQ ID NO: 7640 - DNA, 17 bp, Artificial Sequence
  Synthetic oligonucleotide
  Mismatch hsa-miR-4481 MIMAT0019015
aaccacttgcccactcc

SEQ ID NO: 7641 - DNA, 22 bp, Artificial Sequence
  Synthetic oligonucleotide
  Mismatch hsa-miR-449b-5p MIMAT0003327
gccagctaacatcacactgcct

SEQ ID NO: 7642 - DNA, 22 bp, Artificial Sequence
  Synthetic oligonucleotide
  Mismatch hsa-miR-4636 MIMAT0019693
ctaaaggctttatacacgagtt

SEQ ID NO: 7643 - DNA, 22 bp, Artificial Sequence
  Synthetic oligonucleotide
  Mismatch hsa-miR-6719-3p MIMAT0025850
caggagaatcatcgatgtcaga

SEQ ID NO: 7644 - DNA, 22 bp, Artificial Sequence
  Synthetic oligonucleotide
  Mismatch hsa-miR-4652-5p MIMAT0019716
tagttctattattcagtcccct

SEQ ID NO: 7645 - DNA, 17 bp, Artificial Sequence
  Synthetic oligonucleotide
  Mismatch hsa-miR-4318 MIMAT0016869
agcatgctcccacagtg

SEQ ID NO: 7646 - DNA, 18 bp, Artificial Sequence
  Synthetic oligonucleotide
  Mismatch hsa-miR-7153-3p MIMAT0028217
ggtaaactatccatggtg

SEQ ID NO: 7647 - DNA, 22 bp, Artificial Sequence
  Synthetic oligonucleotide
  Mismatch hsa-miR-1262 MIMAT0005914
atccttctacattttcacccat

SEQ ID NO: 7648 - DNA, 22 bp, Artificial Sequence
  Synthetic oligonucleotide
  Mismatch hsa-miR-4795-3p MIMAT0019969
atccagaagtgattaataatat

SEQ ID NO: 7649 - DNA, 22 bp, Artificial Sequence
  Synthetic oligonucleotide
  Mismatch hsa-miR-29c-5p MIMAT0004673
gaacaccaggaataatcggtca

SEQ ID NO: 7650 - DNA, 22 bp, Artificial Sequence
  Synthetic oligonucleotide
  Mismatch hsa-miR-374b-5p MIMAT0004955
cacttagcaggccgtattatat

SEQ ID NO: 7651 - DNA, 22 bp, Artificial Sequence
  Synthetic oligonucleotide
  Mismatch hsa-miR-30c-1-3p MIMAT0004674
ggagtaaacaattctctcccag

SEQ ID NO: 7652 - DNA, 22 bp, Artificial Sequence
  Synthetic oligonucleotide
  Mismatch hsa-miR-616-3p MIMAT0004805
ctgctcaaacctcccaatgact

SEQ ID NO: 7653 - DNA, 23 bp, Artificial Sequence
  Synthetic oligonucleotide
  Mismatch hsa-miR-548w MIMAT0015060
aggcaaaaaccgttgttactttt

SEQ ID NO: 7654 - DNA, 22 bp, Artificial Sequence
  Synthetic oligonucleotide
  Mismatch hsa-miR-561-5p MIMAT0022706
ggcaaagtttataatccttgat

SEQ ID NO: 7655 - DNA, 22 bp, Artificial Sequence
  Synthetic oligonucleotide
  Mismatch hsa-miR-4445-5p MIMAT0018963
tgcacggcaaataaaacaatct

SEQ ID NO: 7656 - DNA, 22 bp, Artificial Sequence
  Synthetic oligonucleotide
  Mismatch hsa-miR-4786-3p MIMAT0019955
gcccagaccagtactggcttca

SEQ ID NO: 7657 - DNA, 22 bp, Artificial Sequence
  Synthetic oligonucleotide
  Mismatch hsa-miR-23b-5p MIMAT0004587
aaatcagcatgttaggaaccca

SEQ ID NO: 7658 - DNA, 23 bp, Artificial Sequence
  Synthetic oligonucleotide
  Mismatch hsa-miR-802 MIMAT0004185
acaaggatgaattcttgttactg

SEQ ID NO: 7659 - DNA, 22 bp, Artificial Sequence
  Synthetic oligonucleotide
  Mismatch hsa-miR-125b-5p MIMAT0000423
tcacaagttagaatctcaggga

SEQ ID NO: 7660 - DNA, 21 bp, Artificial Sequence
  Synthetic oligonucleotide
  Mismatch hsa-miR-596 MIMAT0003264
cccgaggagctaggcaggctt

SEQ ID NO: 7661 - DNA, 21 bp, Artificial Sequence
  Synthetic oligonucleotide
  Mismatch hsa-miR-6804-5p MIMAT0027508
cgtcacctgccaacaccctca

SEQ ID NO: 7662 - DNA, 24 bp, Artificial Sequence
  Synthetic oligonucleotide
  Mismatch hsa-miR-3651 MIMAT0018071
tcatgtaccagcgttcgggctatg

SEQ ID NO: 7663 - DNA, 22 bp, Artificial Sequence
  Synthetic oligonucleotide
  Mismatch hsa-miR-545-5p MIMAT0004785
tcatctaataattatttactga

SEQ ID NO: 7664 - DNA, 22 bp, Artificial Sequence
  Synthetic oligonucleotide
  Mismatch hsa-miR-371b-5p MIMAT0019892
aaagtgccgcctccttttgagt

SEQ ID NO: 7665 - DNA, 22 bp, Artificial Sequence
  Synthetic oligonucleotide
  Mismatch hsa-miR-4773 MIMAT0019928
gcctttctatgtccctgttctg

SEQ ID NO: 7666 - DNA, 18 bp, Artificial Sequence
  Synthetic oligonucleotide
  Mismatch hsa-miR-4468 MIMAT0018995
atctcatttttctgctct

SEQ ID NO: 7667 - DNA, 25 bp, Artificial Sequence
  Synthetic oligonucleotide
  Mismatch hsa-miR-519d-5p MIMAT0026610
aacagaaagcgcttttctttggagg

SEQ ID NO: 7668 - DNA, 22 bp, Artificial Sequence
  Synthetic oligonucleotide
  Mismatch hsa-miR-4653-5p MIMAT0019718
ggtgttaagccccgctcagaga

SEQ ID NO: 7669 - DNA, 22 bp, Artificial Sequence
  Synthetic oligonucleotide
  Mismatch hsa-miR-516b-5p MIMAT0002859
aaagtgcttctctcctccagat

SEQ ID NO: 7670 - DNA, 23 bp, Artificial Sequence
  Synthetic oligonucleotide
  Mismatch hsa-miR-302c-3p MIMAT0000717
ccactgaaacataaaagcactta

SEQ ID NO: 7671 - DNA, 21 bp, Artificial Sequence
  Synthetic oligonucleotide
  Mismatch hsa-miR-671-3p MIMAT0004819
ggtggagccccaagaaccgga

SEQ ID NO: 7672 - DNA, 19 bp, Artificial Sequence
  Synthetic oligonucleotide
  Mismatch hsa-miR-1261 MIMAT0005913
aagccaaaatcttatccat

SEQ ID NO: 7673 - DNA, 22 bp, Artificial Sequence
  Synthetic oligonucleotide
  Mismatch hsa-miR-545-3p MIMAT0003165
gcacacaataatcgtttgctga

SEQ ID NO: 7674 - DNA, 22 bp, Artificial Sequence
  Synthetic oligonucleotide
  Mismatch hsa-miR-184 MIMAT0000454
acccttatcagccctccgtcca

SEQ ID NO: 7675 - DNA, 27 bp, Artificial Sequence
  Synthetic oligonucleotide
  Mismatch hsa-miR-7107-3p MIMAT0028112
ggccaaaaagagagaacaaacagacca

SEQ ID NO: 7676 - DNA, 21 bp, Artificial Sequence
  Synthetic oligonucleotide
  Mismatch hsa-miR-7151-3p MIMAT0028213
tgagcccattttagcctgtag

SEQ ID NO: 7677 - DNA, 22 bp, Artificial Sequence
  Synthetic oligonucleotide
  Mismatch hsa-miR-93-3p MIMAT0004509
cgggaagtgcttactcagcagt

SEQ ID NO: 7678 - DNA, 23 bp, Artificial Sequence
  Synthetic oligonucleotide
  Mismatch hsa-miR-128-2-5p MIMAT0031095
tctcgtacagtgcttcggccccc

SEQ ID NO: 7679 - DNA, 23 bp, Artificial Sequence
  Synthetic oligonucleotide
  Mismatch hsa-miR-135b-5p MIMAT0000758
tcacataggaatataaagccata

SEQ ID NO: 7680 - DNA, 21 bp, Artificial Sequence
  Synthetic oligonucleotide
  Mismatch hsa-miR-548j-3p MIMAT0026737
gcaaaagtaacacagtttttg

SEQ ID NO: 7681 - DNA, 21 bp, Artificial Sequence
  Synthetic oligonucleotide
  Mismatch hsa-miR-195-5p MIMAT0000461
gccaatattttcgtgctgcta

SEQ ID NO: 7682 - DNA, 22 bp, Artificial Sequence
  Synthetic oligonucleotide
  Mismatch hsa-miR-651-3p MIMAT0026624
cttttaggatattctttccttt

SEQ ID NO: 7683 - DNA, 22 bp, Artificial Sequence
  Synthetic oligonucleotide
  Mismatch hsa-miR-125a-3p MIMAT0004602
ggctcccaagattctcacctgt

SEQ ID NO: 7684 - DNA, 23 bp, Artificial Sequence
  Synthetic oligonucleotide
  Mismatch hsa-miR-328-5p MIMAT0026486
ccctgagccccttttgccccccc

SEQ ID NO: 7685 - DNA, 21 bp, Artificial Sequence
  Synthetic oligonucleotide
  Mismatch hsa-miR-8057 MIMAT0030984
tccatcttacctcagagccac

SEQ ID NO: 7686 - DNA, 23 bp, Artificial Sequence
  Synthetic oligonucleotide
  Mismatch hsa-miR-6798-5p MIMAT0027496
cccaagctcgcctttccccctgg

SEQ ID NO: 7687 - DNA, 22 bp, Artificial Sequence
  Synthetic oligonucleotide
  Mismatch hsa-let-7a-2-3p MIMAT0010195
ggaaagctaggtagctgtacag

SEQ ID NO: 7688 - DNA, 17 bp, Artificial Sequence
  Synthetic oligonucleotide
  Mismatch hsa-miR-4258 MIMAT0016879
ccaaggtagtggcgggg

SEQ ID NO: 7689 - DNA, 21 bp, Artificial Sequence
  Synthetic oligonucleotide
  Mismatch hsa-miR-6819-3p MIMAT0027539
ctggggtgggatcagaggctt

SEQ ID NO: 7690 - DNA, 23 bp, Artificial Sequence
  Synthetic oligonucleotide
  Mismatch hsa-miR-224-3p MIMAT0009198
tgtagtcactagaacaccatttt

SEQ ID NO: 7691 - DNA, 22 bp, Artificial Sequence
  Synthetic oligonucleotide
  Mismatch hsa-miR-520d-3p MIMAT0002856
acccaccaaagtaaagcacttt

SEQ ID NO: 7692 - DNA, 22 bp, Artificial Sequence
  Synthetic oligonucleotide
  Mismatch hsa-miR-6752-5p MIMAT0027404
gccccctggctttacacccccc

SEQ ID NO: 7693 - DNA, 17 bp, Artificial Sequence
  Synthetic oligonucleotide
  Mismatch hsa-miR-4447 MIMAT0018966
aaacaattgcccccacc

SEQ ID NO: 7694 - DNA, 22 bp, Artificial Sequence
  Synthetic oligonucleotide
  Mismatch hsa-miR-450b-5p MIMAT0004909
tattcaggaactcattgcaaaa

SEQ ID NO: 7695 - DNA, 17 bp, Artificial Sequence
  Synthetic oligonucleotide
  Mismatch hsa-miR-3182 MIMAT0015062
gactactttacagaagc

SEQ ID NO: 7696 - DNA, 22 bp, Artificial Sequence
  Synthetic oligonucleotide
  Mismatch hsa-miR-4704-5p MIMAT0019803
aatcactcacacacctagtgtc

SEQ ID NO: 7697 - DNA, 24 bp, Artificial Sequence
  Synthetic oligonucleotide
  Mismatch hsa-miR-6894-5p MIMAT0027688
tctggcccagctcctcatcctcct

SEQ ID NO: 7698 - DNA, 24 bp, Artificial Sequence
  Synthetic oligonucleotide
  Mismatch hsa-miR-6747-5p MIMAT0027394
tgttctgcctcttctcacacccct

SEQ ID NO: 7699 - DNA, 19 bp, Artificial Sequence
  Synthetic oligonucleotide
  Mismatch hsa-miR-4271 MIMAT0016901
ccccacctcctcttccccc

SEQ ID NO: 7700 - DNA, 18 bp, Artificial Sequence
  Synthetic oligonucleotide
  Mismatch hsa-miR-4792 MIMAT0019964
gccagcgtacgctcaccg

SEQ ID NO: 7701 - DNA, 23 bp, Artificial Sequence
  Synthetic oligonucleotide
  Mismatch hsa-miR-4683 MIMAT0019768
atcgggcgagcatcggatctcca

SEQ ID NO: 7702 - DNA, 22 bp, Artificial Sequence
  Synthetic oligonucleotide
  Mismatch hsa-miR-4790-3p MIMAT0019962
tgtgacatcgccctaccattca

SEQ ID NO: 7703 - DNA, 21 bp, Artificial Sequence
  Synthetic oligonucleotide
  Mismatch hsa-miR-6737-5p MIMAT0027375
ctccagggccatccaccccaa

SEQ ID NO: 7704 - DNA, 19 bp, Artificial Sequence
  Synthetic oligonucleotide
  Mismatch hsa-miR-6082 MIMAT0023707
ggatcaacttgacgtattc

SEQ ID NO: 7705 - DNA, 23 bp, Artificial Sequence
  Synthetic oligonucleotide
  Mismatch hsa-miR-4691-3p MIMAT0019782
atgcactctcagctcgtggctgg

SEQ ID NO: 7706 - DNA, 21 bp, Artificial Sequence
  Synthetic oligonucleotide
  Mismatch hsa-miR-1228-5p MIMAT0005582
cacacacctgttcccgcccac

SEQ ID NO: 7707 - DNA, 19 bp, Artificial Sequence
  Synthetic oligonucleotide
  Mismatch hsa-miR-3654 MIMAT0018074
ttcctcagtctgtccagtc

SEQ ID NO: 7708 - DNA, 21 bp, Artificial Sequence
  Synthetic oligonucleotide
  Mismatch hsa-miR-7114-3p MIMAT0028126
ctggtggagaaaggtgggtca

SEQ ID NO: 7709 - DNA, 22 bp, Artificial Sequence
  Synthetic oligonucleotide
  Mismatch hsa-miR-299-3p MIMAT0000687
aagcggtttactttcccacata

SEQ ID NO: 7710 - DNA, 23 bp, Artificial Sequence
  Synthetic oligonucleotide
  Mismatch hsa-miR-636 MIMAT0003306
tgcgggcgggacatgcaagcaca

SEQ ID NO: 7711 - DNA, 23 bp, Artificial Sequence
  Synthetic oligonucleotide
  Mismatch hsa-miR-4254 MIMAT0016884
gagatggtggagctgctccaggc

SEQ ID NO: 7712 - DNA, 21 bp, Artificial Sequence
  Synthetic oligonucleotide
  Mismatch hsa-miR-578 MIMAT0003243
acaatcctagtacacaagaag

SEQ ID NO: 7713 - DNA, 22 bp, Artificial Sequence
  Synthetic oligonucleotide
  Mismatch hsa-miR-3150b-5p MIMAT0019226
gctggggagattttcgaggttg

SEQ ID NO: 7714 - DNA, 21 bp, Artificial Sequence
  Synthetic oligonucleotide
  Mismatch hsa-miR-6834-5p MIMAT0027568
ccacaaatccttgtccctcac

SEQ ID NO: 7715 - DNA, 23 bp, Artificial Sequence
  Synthetic oligonucleotide
  Mismatch hsa-miR-3174 MIMAT0015051
ggctctgcatcttcaactcacta

SEQ ID NO: 7716 - DNA, 22 bp, Artificial Sequence
  Synthetic oligonucleotide
  Mismatch hsa-miR-6739-5p MIMAT0027379
tacttgttcttcttctttccca

SEQ ID NO: 7717 - DNA, 21 bp, Artificial Sequence
  Synthetic oligonucleotide
  Mismatch hsa-miR-1206 MIMAT0005870
gcttaaacattcacatgaaca

SEQ ID NO: 7718 - DNA, 22 bp, Artificial Sequence
  Synthetic oligonucleotide
  Mismatch hsa-miR-934 MIMAT0004977
ccagtgtctcctatagtagaca

SEQ ID NO: 7719 - DNA, 21 bp, Artificial Sequence
  Synthetic oligonucleotide
  Mismatch hsa-miR-6823-5p MIMAT0027546
agcaacccctttcaaccctga

SEQ ID NO: 7720 - DNA, 22 bp, Artificial Sequence
  Synthetic oligonucleotide
  Mismatch hsa-miR-548am-3p MIMAT0019076
acaaaagtaaccacagtttttg

SEQ ID NO: 7721 - DNA, 22 bp, Artificial Sequence
  Synthetic oligonucleotide
  Mismatch hsa-miR-3939 MIMAT0018355
gacatcctgtgacctgcgcgta

SEQ ID NO: 7722 - DNA, 22 bp, Artificial Sequence
  Synthetic oligonucleotide
  Mismatch hsa-miR-424-5p MIMAT0001341
ttcaaaacatgttttgctgctg

SEQ ID NO: 7723 - DNA, 22 bp, Artificial Sequence
  Synthetic oligonucleotide
  Mismatch hsa-miR-6868-5p MIMAT0027636
gctgcttcagtactctgccagt

SEQ ID NO: 7724 - DNA, 21 bp, Artificial Sequence
  Synthetic oligonucleotide
  Mismatch hsa-miR-6502-3p MIMAT0025461
atactctagattgatggtcta

SEQ ID NO: 7725 - DNA, 22 bp, Artificial Sequence
  Synthetic oligonucleotide
  Mismatch hsa-miR-194-5p MIMAT0000460
tccacatggagccgctgttaca

SEQ ID NO: 7726 - DNA, 22 bp, Artificial Sequence
  Synthetic oligonucleotide
  Mismatch hsa-miR-3667-3p MIMAT0018090
aaagacccatgatgaggaaggt

SEQ ID NO: 7727 - DNA, 19 bp, Artificial Sequence
  Synthetic oligonucleotide
  Mismatch hsa-miR-1322 MIMAT0005953
cagcatcaatagcatcatc

SEQ ID NO: 7728 - DNA, 22 bp, Artificial Sequence
  Synthetic oligonucleotide
  Mismatch hsa-miR-6842-3p MIMAT0027587
ctgcggagcagtaaccagccaa

SEQ ID NO: 7729 - DNA, 21 bp, Artificial Sequence
  Synthetic oligonucleotide
  Mismatch hsa-miR-5189-3p MIMAT0027088
tctgggctctatcggttggca

SEQ ID NO: 7730 - DNA, 23 bp, Artificial Sequence
  Synthetic oligonucleotide
  Mismatch hsa-miR-4742-3p MIMAT0019873
ctgcaggcaaagatgaatacaga

SEQ ID NO: 7731 - DNA, 21 bp, Artificial Sequence
  Synthetic oligonucleotide
  Mismatch hsa-miR-4495 MIMAT0019030
agcaaaaagctcgtttacatt

SEQ ID NO: 7732 - DNA, 22 bp, Artificial Sequence
  Synthetic oligonucleotide
  Mismatch hsa-miR-548bb-5p MIMAT0035703
ggcaaaaaccactgttactttt

SEQ ID NO: 7733 - DNA, 26 bp, Artificial Sequence
  Synthetic oligonucleotide
  Mismatch hsa-miR-4518 MIMAT0019055
tctcagcacagttattttccctgagc

SEQ ID NO: 7734 - DNA, 20 bp, Artificial Sequence
  Synthetic oligonucleotide
  Mismatch hsa-miR-609 MIMAT0003277
agagatgagtaaaacaccct

SEQ ID NO: 7735 - DNA, 20 bp, Artificial Sequence
  Synthetic oligonucleotide
  Mismatch hsa-miR-548aw MIMAT0022471
aaccgtgatatcttttgcac

SEQ ID NO: 7736 - DNA, 24 bp, Artificial Sequence
  Synthetic oligonucleotide
  Mismatch hsa-miR-3609 MIMAT0017986
cagccagtattacctatcactttg

SEQ ID NO: 7737 - DNA, 23 bp, Artificial Sequence
  Synthetic oligonucleotide
  Mismatch hsa-miR-3944-3p MIMAT0018360
ccggagcagcagatcagcccgaa

SEQ ID NO: 7738 - DNA, 21 bp, Artificial Sequence
  Synthetic oligonucleotide
  Mismatch hsa-miR-7110-5p MIMAT0028117
ctctctctccttacaccccca

SEQ ID NO: 7739 - DNA, 18 bp, Artificial Sequence
  Synthetic oligonucleotide
  Mismatch hsa-miR-7975 MIMAT0031178
tggtgccacgactaggat

SEQ ID NO: 7740 - DNA, 22 bp, Artificial Sequence
  Synthetic oligonucleotide
  Mismatch hsa-miR-548a-3p MIMAT0003251
gcaaaagtaatcaccagttttg

SEQ ID NO: 7741 - DNA, 18 bp, Artificial Sequence
  Synthetic oligonucleotide
  Mismatch hsa-miR-6126 MIMAT0024599
tctccgctaggccttcac

SEQ ID NO: 7742 - DNA, 22 bp, Artificial Sequence
  Synthetic oligonucleotide
  Mismatch hsa-miR-4440 MIMAT0018958
caagccagcaaatcccacgaca

SEQ ID NO: 7743 - DNA, 23 bp, Artificial Sequence
  Synthetic oligonucleotide
  Mismatch hsa-miR-1255a MIMAT0005906
aatctactttctccgctcatcct

SEQ ID NO: 7744 - DNA, 21 bp, Artificial Sequence
  Synthetic oligonucleotide
  Mismatch hsa-miR-378h MIMAT0018984
ccatctgacattaagtccagt

SEQ ID NO: 7745 - DNA, 19 bp, Artificial Sequence
  Synthetic oligonucleotide
  Mismatch hsa-miR-7976 MIMAT0031179
gagcaaaaacctcagggca

SEQ ID NO: 7746 - DNA, 22 bp, Artificial Sequence
  Synthetic oligonucleotide
  Mismatch hsa-miR-1468-3p MIMAT0026638
ttttccatttgtctattttgct

SEQ ID NO: 7747 - DNA, 22 bp, Artificial Sequence
  Synthetic oligonucleotide
  Mismatch hsa-miR-4719 MIMAT0019832
cctgcatattactgatttgtga

SEQ ID NO: 7748 - DNA, 21 bp, Artificial Sequence
  Synthetic oligonucleotide
  Mismatch hsa-miR-4727-5p MIMAT0019847
ccactgtggatactggcagat

SEQ ID NO: 7749 - DNA, 20 bp, Artificial Sequence
  Synthetic oligonucleotide
  Mismatch hsa-miR-620 MIMAT0003289
atttctatacttatctccat

SEQ ID NO: 7750 - DNA, 22 bp, Artificial Sequence
  Synthetic oligonucleotide
  Mismatch hsa-miR-451b MIMAT0019840
aatggtaatggccctcttgcta

SEQ ID NO: 7751 - DNA, 20 bp, Artificial Sequence
  Synthetic oligonucleotide
  Mismatch hsa-miR-6832-3p MIMAT0027565
ctgggaaagtaaaaaagggt

SEQ ID NO: 7752 - DNA, 23 bp, Artificial Sequence
  Synthetic oligonucleotide
  Mismatch hsa-miR-4660 MIMAT0019728
ctccattttccattagagctgca

SEQ ID NO: 7753 - DNA, 22 bp, Artificial Sequence
  Synthetic oligonucleotide
  Mismatch hsa-miR-619-5p MIMAT0026622
ggctcatgcctacaatcccagc

SEQ ID NO: 7754 - DNA, 20 bp, Artificial Sequence
  Synthetic oligonucleotide
  Mismatch hsa-miR-6838-3p MIMAT0027579
ctgcaacagttgcaggactt

SEQ ID NO: 7755 - DNA, 19 bp, Artificial Sequence
  Synthetic oligonucleotide
  Mismatch hsa-miR-6127 MIMAT0024610
cctcccacttactccctca

SEQ ID NO: 7756 - DNA, 22 bp, Artificial Sequence
  Synthetic oligonucleotide
  Mismatch hsa-miR-597-5p MIMAT0003265
acagtggtcattaagtgacaca

SEQ ID NO: 7757 - DNA, 22 bp, Artificial Sequence
  Synthetic oligonucleotide
  Mismatch hsa-miR-550a-3p MIMAT0003257
atgtgcctgagaaagtaagaca

SEQ ID NO: 7758 - DNA, 22 bp, Artificial Sequence
  Synthetic oligonucleotide
  Mismatch hsa-miR-3144-3p MIMAT0015015
taaagagaccgttcaggtatat

SEQ ID NO: 7759 - DNA, 22 bp, Artificial Sequence
  Synthetic oligonucleotide
  Mismatch hsa-let-7e-5p MIMAT0000066
aactatacaactccctacctca

SEQ ID NO: 7760 - DNA, 22 bp, Artificial Sequence
  Synthetic oligonucleotide
  Mismatch hsa-miR-3127-3p MIMAT0019201
ccagcaggcctatagaagggga

SEQ ID NO: 7761 - DNA, 22 bp, Artificial Sequence
  Synthetic oligonucleotide
  Mismatch hsa-miR-4510 MIMAT0019047
aaccatacatctcactccctca

SEQ ID NO: 7762 - DNA, 20 bp, Artificial Sequence
  Synthetic oligonucleotide
  Mismatch hsa-miR-4301 MIMAT0016850
tcacaagtgttgtagtggga

SEQ ID NO: 7763 - DNA, 21 bp, Artificial Sequence
  Synthetic oligonucleotide
  Mismatch hsa-miR-4708-5p MIMAT0019809
aaggagcaagatggcatctct

SEQ ID NO: 7764 - DNA, 21 bp, Artificial Sequence
  Synthetic oligonucleotide
  Mismatch hsa-miR-8088 MIMAT0031015
tacccctttcttgtaccgagg

SEQ ID NO: 7765 - DNA, 17 bp, Artificial Sequence
  Synthetic oligonucleotide
  Mismatch hsa-miR-1227-5p MIMAT0022941
ccaccgtttggccccac

SEQ ID NO: 7766 - DNA, 24 bp, Artificial Sequence
  Synthetic oligonucleotide
  Mismatch hsa-miR-5189-5p MIMAT0021120
cctgtccatccgctcgtgcccaga

SEQ ID NO: 7767 - DNA, 22 bp, Artificial Sequence
  Synthetic oligonucleotide
  Mismatch hsa-let-7f-1-3p MIMAT0004486
gggaaggcaattaattgtatag

SEQ ID NO: 7768 - DNA, 22 bp, Artificial Sequence
  Synthetic oligonucleotide
  Mismatch hsa-miR-8063 MIMAT0030990
aagccccgacttttgattttga

SEQ ID NO: 7769 - DNA, 20 bp, Artificial Sequence
  Synthetic oligonucleotide
  Mismatch hsa-miR-760 MIMAT0004957
tccccacagttccagagccg

SEQ ID NO: 7770 - DNA, 21 bp, Artificial Sequence
  Synthetic oligonucleotide
  Mismatch hsa-miR-583 MIMAT0003248
gtaatgggactctcctctttg

SEQ ID NO: 7771 - DNA, 22 bp, Artificial Sequence
  Synthetic oligonucleotide
  Mismatch hsa-let-7c-3p MIMAT0026472
ggaaagctagatagttgtacag

SEQ ID NO: 7772 - DNA, 23 bp, Artificial Sequence
  Synthetic oligonucleotide
  Mismatch hsa-miR-611 MIMAT0003279
gtcagaccccgaaaggtcctcgc

SEQ ID NO: 7773 - DNA, 23 bp, Artificial Sequence
  Synthetic oligonucleotide
  Mismatch hsa-miR-203b-3p MIMAT0019814
tccagtggttctctacagttcaa

SEQ ID NO: 7774 - DNA, 22 bp, Artificial Sequence
  Synthetic oligonucleotide
  Mismatch hsa-miR-1296-3p MIMAT0026637
ggttagggtcgttgccccactc

SEQ ID NO: 7775 - DNA, 23 bp, Artificial Sequence
  Synthetic oligonucleotide
  Mismatch hsa-miR-4724-5p MIMAT0019841
cgaagctcactctcggttcagtt

SEQ ID NO: 7776 - DNA, 23 bp, Artificial Sequence
  Synthetic oligonucleotide
  Mismatch hsa-miR-4703-5p MIMAT0019801
actatatttgtatcgtattgcta

SEQ ID NO: 7777 - DNA, 26 bp, Artificial Sequence
  Synthetic oligonucleotide
  Mismatch hsa-miR-4700-3p MIMAT0019797
cactggggtgaggagctagtcctgtg

SEQ ID NO: 7778 - DNA, 19 bp, Artificial Sequence
  Synthetic oligonucleotide
  Mismatch hsa-miR-4287 MIMAT0016917
aaagtgcctccaagggaga

SEQ ID NO: 7779 - DNA, 21 bp, Artificial Sequence
  Synthetic oligonucleotide
  Mismatch hsa-miR-6843-3p MIMAT0027588
ctgcagagaattggagaccat

SEQ ID NO: 7780 - DNA, 23 bp, Artificial Sequence
  Synthetic oligonucleotide
  Mismatch hsa-miR-3929 MIMAT0018206
agtggtctactcttatcagcctc

SEQ ID NO: 7781 - DNA, 21 bp, Artificial Sequence
  Synthetic oligonucleotide
  Mismatch hsa-miR-631 MIMAT0003300
gctgaggtctaagccaggtct

SEQ ID NO: 7782 - DNA, 21 bp, Artificial Sequence
  Synthetic oligonucleotide
  Mismatch hsa-miR-7846-3p MIMAT0030421
ccttctctcctagctccgctg

SEQ ID NO: 7783 - DNA, 23 bp, Artificial Sequence
  Synthetic oligonucleotide
  Mismatch hsa-miR-3921 MIMAT0018196
acaaggcatatgacactcagaga

SEQ ID NO: 7784 - DNA, 22 bp, Artificial Sequence
  Synthetic oligonucleotide
  Mismatch hsa-miR-6737-3p MIMAT0027376
ctgggtaggggcaaagcacaga

SEQ ID NO: 7785 - DNA, 22 bp, Artificial Sequence
  Synthetic oligonucleotide
  Mismatch hsa-miR-125b-1-3p MIMAT0004592
agctcccaagaatctaacccgt

SEQ ID NO: 7786 - DNA, 22 bp, Artificial Sequence
  Synthetic oligonucleotide
  Mismatch hsa-miR-4774-5p MIMAT0019929
ttattacctacctcataccaga

SEQ ID NO: 7787 - DNA, 22 bp, Artificial Sequence
  Synthetic oligonucleotide
  Mismatch hsa-miR-4435 MIMAT0018951
cctctgtgtgaattctggccat

SEQ ID NO: 7788 - DNA, 21 bp, Artificial Sequence
  Synthetic oligonucleotide
  Mismatch hsa-miR-6798-3p MIMAT0027497
ctacagggggtcggggggtag

SEQ ID NO: 7789 - DNA, 16 bp, Artificial Sequence
  Synthetic oligonucleotide
  Mismatch hsa-miR-4266 MIMAT0016892
ggccatagcctcctag

SEQ ID NO: 7790 - DNA, 21 bp, Artificial Sequence
  Synthetic oligonucleotide
  Mismatch hsa-miR-1910-5p MIMAT0007884
aggcggcaggttcaggactgg

SEQ ID NO: 7791 - DNA, 22 bp, Artificial Sequence
  Synthetic oligonucleotide
  Mismatch hsa-miR-4769-3p MIMAT0019923
gtaggggagggtagatggcaga

SEQ ID NO: 7792 - DNA, 22 bp, Artificial Sequence
  Synthetic oligonucleotide
  Mismatch hsa-miR-548ab MIMAT0018928
agcaaaatccattattactttt

SEQ ID NO: 7793 - DNA, 22 bp, Artificial Sequence
  Synthetic oligonucleotide
  Mismatch hsa-miR-181a-3p MIMAT0000270
ggtacaatcaatagtcgatggt

SEQ ID NO: 7794 - DNA, 24 bp, Artificial Sequence
  Synthetic oligonucleotide
  Mismatch hsa-miR-664a-5p MIMAT0005948
atccaatcattttttctagccagt

SEQ ID NO: 7795 - DNA, 23 bp, Artificial Sequence
  Synthetic oligonucleotide
  Mismatch hsa-miR-466 MIMAT0015002
atgtgtgttgcgcatatgtgtat

SEQ ID NO: 7796 - DNA, 16 bp, Artificial Sequence
  Synthetic oligonucleotide
  Mismatch hsa-miR-4279 MIMAT0016909
gaagctaggaggagag

SEQ ID NO: 7797 - DNA, 23 bp, Artificial Sequence
  Synthetic oligonucleotide
  Mismatch hsa-miR-219b-3p MIMAT0019748
actgattgtccattcgcaattct

SEQ ID NO: 7798 - DNA, 22 bp, Artificial Sequence
  Synthetic oligonucleotide
  Mismatch hsa-miR-4425 MIMAT0018940
atggtcctgctatatcccaaca

SEQ ID NO: 7799 - DNA, 22 bp, Artificial Sequence
  Synthetic oligonucleotide
  Mismatch hsa-miR-16-2-3p MIMAT0004518
taaagcagcactataatattgg

SEQ ID NO: 7800 - DNA, 22 bp, Artificial Sequence
  Synthetic oligonucleotide
  Mismatch hsa-miR-320a MIMAT0000510
tcgccctctcattccagctttt

SEQ ID NO: 7801 - DNA, 22 bp, Artificial Sequence
  Synthetic oligonucleotide
  Mismatch hsa-miR-7843-3p MIMAT0030412
cgtaaggcagaataggcttcat

SEQ ID NO: 7802 - DNA, 22 bp, Artificial Sequence
  Synthetic oligonucleotide
  Mismatch hsa-miR-1225-5p MIMAT0005572
ccccccactggatcgtacccac

SEQ ID NO: 7803 - DNA, 17 bp, Artificial Sequence
  Synthetic oligonucleotide
  Mismatch hsa-miR-4288 MIMAT0016918
ggaaacctagcagacaa

SEQ ID NO: 7804 - DNA, 23 bp, Artificial Sequence
  Synthetic oligonucleotide
  Mismatch hsa-miR-181a-5p MIMAT0000256
actcaccgacagtattgaatgtt

SEQ ID NO: 7805 - DNA, 22 bp, Artificial Sequence
  Synthetic oligonucleotide
  Mismatch hsa-miR-4662a-3p MIMAT0019732
atttagccaatcatctatcttt

SEQ ID NO: 7806 - DNA, 21 bp, Artificial Sequence
  Synthetic oligonucleotide
  Mismatch hsa-miR-4766-3p MIMAT0019918
ttccaaaagaataattgctat

SEQ ID NO: 7807 - DNA, 22 bp, Artificial Sequence
  Synthetic oligonucleotide
  Mismatch hsa-miR-1245b-3p MIMAT0019951
tataggccttttaatcatctga

SEQ ID NO: 7808 - DNA, 21 bp, Artificial Sequence
  Synthetic oligonucleotide
  Mismatch hsa-miR-6749-3p MIMAT0027399
ctgggccaggttggggaggag

SEQ ID NO: 7809 - DNA, 18 bp, Artificial Sequence
  Synthetic oligonucleotide
  Mismatch hsa-miR-1827 MIMAT0006767
attcaattcactgcctca

SEQ ID NO: 7810 - DNA, 22 bp, Artificial Sequence
  Synthetic oligonucleotide
  Mismatch hsa-miR-5695 MIMAT0022488
ctgtctagatttctcttggagt

SEQ ID NO: 7811 - DNA, 22 bp, Artificial Sequence
  Synthetic oligonucleotide
  Mismatch hsa-miR-1299 MIMAT0005887
tccctcacacaatattccagaa

SEQ ID NO: 7812 - DNA, 22 bp, Artificial Sequence
  Synthetic oligonucleotide
  Mismatch hsa-miR-374c-3p MIMAT0022735
atataatacaatttgctaagtg

SEQ ID NO: 7813 - DNA, 20 bp, Artificial Sequence
  Synthetic oligonucleotide
  Mismatch hsa-miR-4701-3p MIMAT0019799
acaccacacttatcacccat

SEQ ID NO: 7814 - DNA, 19 bp, Artificial Sequence
  Synthetic oligonucleotide
  Mismatch hsa-miR-7162-3p MIMAT0028235
gctgctgtctcacctcaga

SEQ ID NO: 7815 - DNA, 19 bp, Artificial Sequence
  Synthetic oligonucleotide
  Mismatch hsa-miR-6131 MIMAT0024615
cactcccacttgaccagcc

SEQ ID NO: 7816 - DNA, 21 bp, Artificial Sequence
  Synthetic oligonucleotide
  Mismatch hsa-miR-6845-3p MIMAT0027591
ctggggcacaaagaggagagg

SEQ ID NO: 7817 - DNA, 22 bp, Artificial Sequence
  Synthetic oligonucleotide
  Mismatch hsa-miR-320b MIMAT0005792
ttgccctctcattccagctttt

SEQ ID NO: 7818 - DNA, 22 bp, Artificial Sequence
  Synthetic oligonucleotide
  Mismatch hsa-miR-505-5p MIMAT0004776
acatcaatactctctggctccc

SEQ ID NO: 7819 - DNA, 22 bp, Artificial Sequence
  Synthetic oligonucleotide
  Mismatch hsa-miR-4729 MIMAT0019851
tagcttcccaattgataaatga

SEQ ID NO: 7820 - DNA, 21 bp, Artificial Sequence
  Synthetic oligonucleotide
  Mismatch hsa-miR-6781-5p MIMAT0027462
acgcccttgatttccggcccg

SEQ ID NO: 7821 - DNA, 20 bp, Artificial Sequence
  Synthetic oligonucleotide
  Mismatch hsa-miR-6822-5p MIMAT0027544
aagccccaatcggttccctg

SEQ ID NO: 7822 - DNA, 21 bp, Artificial Sequence
  Synthetic oligonucleotide
  Mismatch hsa-miR-192-5p MIMAT0000222
ggctgtcaatctataggtcag

SEQ ID NO: 7823 - DNA, 22 bp, Artificial Sequence
  Synthetic oligonucleotide
  Mismatch hsa-miR-3664-5p MIMAT0018086
actcatgagtgttgacagagtt

SEQ ID NO: 7824 - DNA, 22 bp, Artificial Sequence
  Synthetic oligonucleotide
  Mismatch hsa-miR-548l MIMAT0005889
gacaaaacccgttaatactttt

SEQ ID NO: 7825 - DNA, 23 bp, Artificial Sequence
  Synthetic oligonucleotide
  Mismatch hsa-miR-6830-3p MIMAT0027561
ctgcaagggagaatagaaagaca

SEQ ID NO: 7826 - DNA, 22 bp, Artificial Sequence
  Synthetic oligonucleotide
  Mismatch hsa-miR-1283 MIMAT0005799
agaaagcgcttctctttgtaga

SEQ ID NO: 7827 - DNA, 21 bp, Artificial Sequence
  Synthetic oligonucleotide
  Mismatch hsa-miR-6729-3p MIMAT0027360
ctgagagggcatgggggatga

SEQ ID NO: 7828 - DNA, 21 bp, Artificial Sequence
  Synthetic oligonucleotide
  Mismatch hsa-miR-5006-3p MIMAT0021034
ctgccaggataaaaagggaaa

SEQ ID NO: 7829 - DNA, 22 bp, Artificial Sequence
  Synthetic oligonucleotide
  Mismatch hsa-miR-5689 MIMAT0022481
tctaggactactagtgtatgct

SEQ ID NO: 7830 - DNA, 22 bp, Artificial Sequence
  Synthetic oligonucleotide
  Mismatch hsa-miR-130b-3p MIMAT0000691
atgccctttcactattgcactg

SEQ ID NO: 7831 - DNA, 23 bp, Artificial Sequence
  Synthetic oligonucleotide
  Mismatch hsa-miR-412-3p MIMAT0002170
acggctagtggattaggtgaagt

SEQ ID NO: 7832 - DNA, 23 bp, Artificial Sequence
  Synthetic oligonucleotide
  Mismatch hsa-miR-548z MIMAT0018446
tgcaaaagtaatcacggtttttg

SEQ ID NO: 7833 - DNA, 22 bp, Artificial Sequence
  Synthetic oligonucleotide
  Mismatch hsa-let-7c-5p MIMAT0000064
aaccatacaactcactacctca

SEQ ID NO: 7834 - DNA, 22 bp, Artificial Sequence
  Synthetic oligonucleotide
  Mismatch hsa-miR-203a-3p MIMAT0000264
ctagtggtcctttacatttcac

SEQ ID NO: 7835 - DNA, 22 bp, Artificial Sequence
  Synthetic oligonucleotide
  Mismatch hsa-miR-377-3p MIMAT0000730
acaaaagttgctcttgtgtgat

SEQ ID NO: 7836 - DNA, 22 bp, Artificial Sequence
  Synthetic oligonucleotide
  Mismatch hsa-miR-6783-3p MIMAT0027467
ctacagaggagttgcccaggaa

SEQ ID NO: 7837 - DNA, 17 bp, Artificial Sequence
  Synthetic oligonucleotide
  Mismatch hsa-miR-4319 MIMAT0016870
gtggctccgctcaggga

SEQ ID NO: 7838 - DNA, 22 bp, Artificial Sequence
  Synthetic oligonucleotide
  Mismatch hsa-miR-6841-5p MIMAT0027584
acaacttgctccaagtacccta

SEQ ID NO: 7839 - DNA, 22 bp, Artificial Sequence
  Synthetic oligonucleotide
  Mismatch hsa-miR-374c-5p MIMAT0018443
agcacttagcaaattgtattat

SEQ ID NO: 7840 - DNA, 22 bp, Artificial Sequence
  Synthetic oligonucleotide
  Mismatch hsa-miR-199b-3p MIMAT0004563
taaccaatgtgttgactactgt

SEQ ID NO: 7841 - DNA, 19 bp, Artificial Sequence
  Synthetic oligonucleotide
  Mismatch hsa-miR-6165 MIMAT0024782
ctcccctcttctcctgctg

SEQ ID NO: 7842 - DNA, 23 bp, Artificial Sequence
  Synthetic oligonucleotide
  Mismatch hsa-miR-454-3p MIMAT0003885
accctataagcatcattgcacta

SEQ ID NO: 7843 - DNA, 20 bp, Artificial Sequence
  Synthetic oligonucleotide
  Mismatch hsa-miR-4639-3p MIMAT0019698
gcaaagcaaaatgagagtga

SEQ ID NO: 7844 - DNA, 22 bp, Artificial Sequence
  Synthetic oligonucleotide
  Mismatch hsa-miR-1278 MIMAT0005936
atagatgatatatacagtacta

SEQ ID NO: 7845 - DNA, 23 bp, Artificial Sequence
  Synthetic oligonucleotide
  Mismatch hsa-miR-6865-5p MIMAT0027630
tgaagtccctcccttgccaccta

SEQ ID NO: 7846 - DNA, 22 bp, Artificial Sequence
  Synthetic oligonucleotide
  Mismatch hsa-miR-5699-3p MIMAT0022492
gctccaacaagataagacagga

SEQ ID NO: 7847 - DNA, 22 bp, Artificial Sequence
  Synthetic oligonucleotide
  Mismatch hsa-miR-6746-3p MIMAT0027393
ctgtggagacaaacggcggctg

SEQ ID NO: 7848 - DNA, 22 bp, Artificial Sequence
  Synthetic oligonucleotide
  Mismatch hsa-miR-6720-3p MIMAT0025851
tctaccagttctcgcaggcgcg

SEQ ID NO: 7849 - DNA, 23 bp, Artificial Sequence
  Synthetic oligonucleotide
  Mismatch hsa-miR-874-5p MIMAT0026718
tcttaccctggtatgtggggccg

SEQ ID NO: 7850 - DNA, 21 bp, Artificial Sequence
  Synthetic oligonucleotide
  Mismatch hsa-miR-6505-3p MIMAT0025467
ctttggaagaaatagaagtca

SEQ ID NO: 7851 - DNA, 23 bp, Artificial Sequence
  Synthetic oligonucleotide
  Mismatch hsa-miR-6849-5p MIMAT0027598
tccacacactcctttatccactc

SEQ ID NO: 7852 - DNA, 19 bp, Artificial Sequence
  Synthetic oligonucleotide
  Mismatch hsa-miR-1973 MIMAT0009448
tatgctactcttgcacggt

SEQ ID NO: 7853 - DNA, 22 bp, Artificial Sequence
  Synthetic oligonucleotide
  Mismatch hsa-miR-4473 MIMAT0019000
tacttgtaacgatgagcactag

SEQ ID NO: 7854 - DNA, 21 bp, Artificial Sequence
  Synthetic oligonucleotide
  Mismatch hsa-miR-6786-5p MIMAT0027472
acgcccctccaaccccaccgc

SEQ ID NO: 7855 - DNA, 22 bp, Artificial Sequence
  Synthetic oligonucleotide
  Mismatch hsa-miR-888-3p MIMAT0004917
ttcacccaaagtagtgtcagtc

SEQ ID NO: 7856 - DNA, 22 bp, Artificial Sequence
  Synthetic oligonucleotide
  Mismatch hsa-miR-3129-3p MIMAT0019202
gcagcagtgtaatgattagttt

SEQ ID NO: 7857 - DNA, 23 bp, Artificial Sequence
  Synthetic oligonucleotide
  Mismatch hsa-miR-6866-5p MIMAT0027632
agaatctctattttagcctctaa

SEQ ID NO: 7858 - DNA, 20 bp, Artificial Sequence
  Synthetic oligonucleotide
  Mismatch hsa-miR-6888-5p MIMAT0027676
atctgcctgtacatctcctt

SEQ ID NO: 7859 - DNA, 23 bp, Artificial Sequence
  Synthetic oligonucleotide
  Mismatch hsa-miR-107 MIMAT0000104
tgatagccctgtttaatgctgct

SEQ ID NO: 7860 - DNA, 23 bp, Artificial Sequence
  Synthetic oligonucleotide
  Mismatch hsa-miR-5003-5p MIMAT0021025
tctaccctgcaaaattgttgtga

SEQ ID NO: 7861 - DNA, 21 bp, Artificial Sequence
  Synthetic oligonucleotide
  Mismatch hsa-miR-4804-5p MIMAT0019984
ttgcttaaccccaccgtccaa

SEQ ID NO: 7862 - DNA, 22 bp, Artificial Sequence
  Synthetic oligonucleotide
  Mismatch hsa-miR-300 MIMAT0004903
agagagagtctatccttgtata

SEQ ID NO: 7863 - DNA, 21 bp, Artificial Sequence
  Synthetic oligonucleotide
  Mismatch hsa-miR-6507-5p MIMAT0025470
acaaagtcccctctattcttc

SEQ ID NO: 7864 - DNA, 20 bp, Artificial Sequence
  Synthetic oligonucleotide
  Mismatch hsa-miR-3678-5p MIMAT0018102
cacagcagaacttgtacgga

SEQ ID NO: 7865 - DNA, 23 bp, Artificial Sequence
  Synthetic oligonucleotide
  Mismatch hsa-miR-6873-3p MIMAT0027647
ctgagagagaaaatcagagagaa

SEQ ID NO: 7866 - DNA, 22 bp, Artificial Sequence
  Synthetic oligonucleotide
  Mismatch hsa-miR-4733-3p MIMAT0019858
atcccaatgcttaacctggtgg

SEQ ID NO: 7867 - DNA, 21 bp, Artificial Sequence
  Synthetic oligonucleotide
  Mismatch hsa-miR-3156-3p MIMAT0019209
agaaagatctaaaagtgggag

SEQ ID NO: 7868 - DNA, 22 bp, Artificial Sequence
  Synthetic oligonucleotide
  Mismatch hsa-miR-4775 MIMAT0019931
agtgaccgaaattaaaaattaa

SEQ ID NO: 7869 - DNA, 21 bp, Artificial Sequence
  Synthetic oligonucleotide
  Mismatch hsa-miR-4671-3p MIMAT0019753
agaccaaagatcatgcactaa

SEQ ID NO: 7870 - DNA, 23 bp, Artificial Sequence
  Synthetic oligonucleotide
  Mismatch hsa-miR-4658 MIMAT0019725
attcctccaggactcacactcac

SEQ ID NO: 7871 - DNA, 21 bp, Artificial Sequence
  Synthetic oligonucleotide
  Mismatch hsa-miR-7845-5p MIMAT0030420
ccacgaccctttctgtccctt

SEQ ID NO: 7872 - DNA, 22 bp, Artificial Sequence
  Synthetic oligonucleotide
  Mismatch hsa-miR-933 MIMAT0004976
gggagaggtctttctgcgcaca

SEQ ID NO: 7873 - DNA, 23 bp, Artificial Sequence
  Synthetic oligonucleotide
  Mismatch hsa-miR-518c-3p MIMAT0002848
acactctaaagaatagcgctttg

SEQ ID NO: 7874 - DNA, 22 bp, Artificial Sequence
  Synthetic oligonucleotide
  Mismatch hsa-miR-3940-3p MIMAT0018356
aagtgggctggattccgggctg

SEQ ID NO: 7875 - DNA, 21 bp, Artificial Sequence
  Synthetic oligonucleotide
  Mismatch hsa-miR-4666a-3p MIMAT0019742
aaatacatgtttgattgtatg

SEQ ID NO: 7876 - DNA, 22 bp, Artificial Sequence
  Synthetic oligonucleotide
  Mismatch hsa-miR-218-2-3p MIMAT0004566
cgcggtgcttgttagaaccatg

SEQ ID NO: 7877 - DNA, 20 bp, Artificial Sequence
  Synthetic oligonucleotide
  Mismatch hsa-miR-6742-3p MIMAT0027386
ctagaggggttaacccaggt

SEQ ID NO: 7878 - DNA, 23 bp, Artificial Sequence
  Synthetic oligonucleotide
  Mismatch hsa-miR-513c-3p MIMAT0022728
tcttctcagaaaaatgaaattta

SEQ ID NO: 7879 - DNA, 22 bp, Artificial Sequence
  Synthetic oligonucleotide
  Mismatch hsa-miR-519b-5p MIMAT0005454
cagaaagcgctctcctctagag

SEQ ID NO: 7880 - DNA, 23 bp, Artificial Sequence
  Synthetic oligonucleotide
  Mismatch hsa-miR-212-5p MIMAT0022695
agtaagcagtcttaagccaaggt

SEQ ID NO: 7881 - DNA, 21 bp, Artificial Sequence
  Synthetic oligonucleotide
  Mismatch hsa-miR-6796-3p MIMAT0027493
ctgcggggagaagagagcttc

SEQ ID NO: 7882 - DNA, 21 bp, Artificial Sequence
  Synthetic oligonucleotide
  Mismatch hsa-miR-889-3p MIMAT0004921
acaatggttgctcgatattaa

SEQ ID NO: 7883 - DNA, 23 bp, Artificial Sequence
  Synthetic oligonucleotide
  Mismatch hsa-miR-2054 MIMAT0009979
aataaattaaatccatattacag

SEQ ID NO: 7884 - DNA, 23 bp, Artificial Sequence
  Synthetic oligonucleotide
  Mismatch hsa-miR-6732-3p MIMAT0027366
ctgggagggagaaaacagggtta

SEQ ID NO: 7885 - DNA, 22 bp, Artificial Sequence
  Synthetic oligonucleotide
  Mismatch hsa-miR-15a-3p MIMAT0004488
tgaggcagcactttatggcctg

SEQ ID NO: 7886 - DNA, 23 bp, Artificial Sequence
  Synthetic oligonucleotide
  Mismatch hsa-miR-6790-5p MIMAT0027480
aaccccgccaaactcacactcac

SEQ ID NO: 7887 - DNA, 23 bp, Artificial Sequence
  Synthetic oligonucleotide
  Mismatch hsa-miR-3614-3p MIMAT0017993
aaaacaccaagacttgaaggcta

SEQ ID NO: 7888 - DNA, 23 bp, Artificial Sequence
  Synthetic oligonucleotide
  Mismatch hsa-miR-574-5p MIMAT0004795
acacactcacacttacacactca

SEQ ID NO: 7889 - DNA, 22 bp, Artificial Sequence
  Synthetic oligonucleotide
  Mismatch hsa-miR-33a-3p MIMAT0004506
gtgatgcactgcagaaacattg

SEQ ID NO: 7890 - DNA, 21 bp, Artificial Sequence
  Synthetic oligonucleotide
  Mismatch hsa-miR-1909-5p MIMAT0007882
cagggcaggcttcggcactca

SEQ ID NO: 7891 - DNA, 22 bp, Artificial Sequence
  Synthetic oligonucleotide
  Mismatch hsa-miR-548g-3p MIMAT0005912
gtacaaaagtatctacagtttt

SEQ ID NO: 7892 - DNA, 26 bp, Artificial Sequence
  Synthetic oligonucleotide
  Mismatch hsa-miR-1226-5p MIMAT0005576
ccccatccaggcctgtttgccctcac

SEQ ID NO: 7893 - DNA, 23 bp, Artificial Sequence
  Synthetic oligonucleotide
  Mismatch hsa-miR-4461 MIMAT0018983
gcctagccctacctgtctcaatc

SEQ ID NO: 7894 - DNA, 22 bp, Artificial Sequence
  Synthetic oligonucleotide
  Mismatch hsa-miR-5580-3p MIMAT0022274
gtgctggctcatctcatatgtg

SEQ ID NO: 7895 - DNA, 23 bp, Artificial Sequence
  Synthetic oligonucleotide
  Mismatch hsa-miR-4657 MIMAT0019724
atgcctcagaccttttccacatt

SEQ ID NO: 7896 - DNA, 20 bp, Artificial Sequence
  Synthetic oligonucleotide
  Mismatch hsa-miR-3610 MIMAT0017987
cggcgcctctcttccgattc

SEQ ID NO: 7897 - DNA, 23 bp, Artificial Sequence
  Synthetic oligonucleotide
  Mismatch hsa-miR-4767 MIMAT0019919
ggcggcggccagatgcgcccgcg

SEQ ID NO: 7898 - DNA, 21 bp, Artificial Sequence
  Synthetic oligonucleotide
  Mismatch hsa-miR-5095 MIMAT0020600
cgcggtggttttcgcctgtaa

SEQ ID NO: 7899 - DNA, 22 bp, Artificial Sequence
  Synthetic oligonucleotide
  Mismatch hsa-miR-296-3p MIMAT0004679
ggagagcctccttccaaccctc

SEQ ID NO: 7900 - DNA, 22 bp, Artificial Sequence
  Synthetic oligonucleotide
  Mismatch hsa-miR-655-5p MIMAT0026626
gaacataacacaaataacctct

SEQ ID NO: 7901 - DNA, 21 bp, Artificial Sequence
  Synthetic oligonucleotide
  Mismatch hsa-miR-7160-5p MIMAT0028230
ggcacagcccaaacctcagca

SEQ ID NO: 7902 - DNA, 23 bp, Artificial Sequence
  Synthetic oligonucleotide
  Mismatch hsa-miR-6720-5p MIMAT0027345
cgcggcgcctacttgggctggaa

SEQ ID NO: 7903 - DNA, 21 bp, Artificial Sequence
  Synthetic oligonucleotide
  Mismatch hsa-miR-4423-3p MIMAT0018936
ttgttgctttccggtgcctat

SEQ ID NO: 7904 - DNA, 21 bp, Artificial Sequence
  Synthetic oligonucleotide
  Mismatch hsa-miR-877-3p MIMAT0004950
ctgggaggagaaagaagagga

SEQ ID NO: 7905 - DNA, 22 bp, Artificial Sequence
  Synthetic oligonucleotide
  Mismatch hsa-miR-519c-5p MIMAT0002831
cagaaagcgctctcctctagag

SEQ ID NO: 7906 - DNA, 21 bp, Artificial Sequence
  Synthetic oligonucleotide
  Mismatch hsa-miR-6752-3p MIMAT0027405
ctgggagtataagggcaggga

SEQ ID NO: 7907 - DNA, 21 bp, Artificial Sequence
  Synthetic oligonucleotide
  Mismatch hsa-miR-5008-3p MIMAT0021040
gcgaggccctaagagcacagg

SEQ ID NO: 7908 - DNA, 21 bp, Artificial Sequence
  Synthetic oligonucleotide
  Mismatch hsa-miR-27b-3p MIMAT0000419
gcagaacttaatcactgtgaa

SEQ ID NO: 7909 - DNA, 22 bp, Artificial Sequence
  Synthetic oligonucleotide
  Mismatch hsa-miR-208b-3p MIMAT0004960
acaaaccttttactcgtcttat

SEQ ID NO: 7910 - DNA, 22 bp, Artificial Sequence
  Synthetic oligonucleotide
  Mismatch hsa-miR-487b-5p MIMAT0026614
cgaacaggacaaagataaccac

SEQ ID NO: 7911 - DNA, 22 bp, Artificial Sequence
  Synthetic oligonucleotide
  Mismatch hsa-miR-649 MIMAT0003319
gactcttgaacttcacaggttt

SEQ ID NO: 7912 - DNA, 20 bp, Artificial Sequence
  Synthetic oligonucleotide
  Mismatch hsa-miR-326 MIMAT0000756
ctggaggaaaagcccagagg

SEQ ID NO: 7913 - DNA, 21 bp, Artificial Sequence
  Synthetic oligonucleotide
  Mismatch hsa-miR-8085 MIMAT0031012
gcctcacagttttctctccca

SEQ ID NO: 7914 - DNA, 22 bp, Artificial Sequence
  Synthetic oligonucleotide
  Mismatch hsa-miR-24-2-5p MIMAT0004497
ctgtgtttcagtccagtaggca

SEQ ID NO: 7915 - DNA, 22 bp, Artificial Sequence
  Synthetic oligonucleotide
  Mismatch hsa-miR-1185-1-3p MIMAT0022838
ataagagtctcttcctgtatat

SEQ ID NO: 7916 - DNA, 23 bp, Artificial Sequence
  Synthetic oligonucleotide
  Mismatch hsa-miR-548g-5p MIMAT0022722
caaaaactgcaaccacttttgca

SEQ ID NO: 7917 - DNA, 20 bp, Artificial Sequence
  Synthetic oligonucleotide
  Mismatch hsa-miR-6086 MIMAT0023711
ctctgccctctccaacctcc

SEQ ID NO: 7918 - DNA, 21 bp, Artificial Sequence
  Synthetic oligonucleotide
  Mismatch hsa-miR-4800-5p MIMAT0019978
tccttccttctccggtccact

SEQ ID NO: 7919 - DNA, 21 bp, Artificial Sequence
  Synthetic oligonucleotide
  Mismatch hsa-miR-6846-3p MIMAT0027593
ctagggagactaaaggggtca

SEQ ID NO: 7920 - DNA, 24 bp, Artificial Sequence
  Synthetic oligonucleotide
  Mismatch hsa-miR-3529-3p MIMAT0022741
tggaagactagtgtctttgttgtt

SEQ ID NO: 7921 - DNA, 22 bp, Artificial Sequence
  Synthetic oligonucleotide
  Mismatch hsa-miR-4661-5p MIMAT0019729
gtcaggatccattgagctagtt

SEQ ID NO: 7922 - DNA, 22 bp, Artificial Sequence
  Synthetic oligonucleotide
  Mismatch hsa-miR-548as-3p MIMAT0022268
acaaacataatcatgggtttta

SEQ ID NO: 7923 - DNA, 24 bp, Artificial Sequence
  Synthetic oligonucleotide
  Mismatch hsa-miR-6817-5p MIMAT0027534
ccactccaagctttttatggcaga

SEQ ID NO: 7924 - DNA, 24 bp, Artificial Sequence
  Synthetic oligonucleotide
  Mismatch hsa-miR-6500-5p MIMAT0025454
ggacacctggagtaaatagctcct

SEQ ID NO: 7925 - DNA, 22 bp, Artificial Sequence
  Synthetic oligonucleotide
  Mismatch hsa-miR-6754-3p MIMAT0027409
tgcaggcagagataggtgaaga

SEQ ID NO: 7926 - DNA, 21 bp, Artificial Sequence
  Synthetic oligonucleotide
  Mismatch hsa-miR-5591-3p MIMAT0022302
tgggagctaaattatgggtat

SEQ ID NO: 7927 - DNA, 22 bp, Artificial Sequence
  Synthetic oligonucleotide
  Mismatch hsa-miR-16-5p MIMAT0000069
cgccaatatttttgtgctgcta

SEQ ID NO: 7928 - DNA, 22 bp, Artificial Sequence
  Synthetic oligonucleotide
  Mismatch hsa-miR-3159 MIMAT0015033
gtggccgacacccgtaatccta

SEQ ID NO: 7929 - DNA, 21 bp, Artificial Sequence
  Synthetic oligonucleotide
  Mismatch hsa-miR-1302 MIMAT0005890
tttagcataaacatgtcccaa

SEQ ID NO: 7930 - DNA, 19 bp, Artificial Sequence
  Synthetic oligonucleotide
  Mismatch hsa-miR-558 MIMAT0003222
attttggtttagcagctca

SEQ ID NO: 7931 - DNA, 21 bp, Artificial Sequence
  Synthetic oligonucleotide
  Mismatch hsa-miR-514b-3p MIMAT0015088
tccactcacaatggtgtcaat

SEQ ID NO: 7932 - DNA, 24 bp, Artificial Sequence
  Synthetic oligonucleotide
  Mismatch hsa-miR-4723-5p MIMAT0019838
tgctcttatctcacagctccccca

SEQ ID NO: 7933 - DNA, 21 bp, Artificial Sequence
  Synthetic oligonucleotide
  Mismatch hsa-miR-4785 MIMAT0019949
gctggcggcgctgccgactct

SEQ ID NO: 7934 - DNA, 22 bp, Artificial Sequence
  Synthetic oligonucleotide
  Mismatch hsa-miR-3671 MIMAT0018094
tgcagactagtttttatttgat

SEQ ID NO: 7935 - DNA, 24 bp, Artificial Sequence
  Synthetic oligonucleotide
  Mismatch hsa-miR-7706 MIMAT0030021
tctcggcagagcattggcgcttca

SEQ ID NO: 7936 - DNA, 22 bp, Artificial Sequence
  Synthetic oligonucleotide
  Mismatch hsa-miR-4502 MIMAT0019038
cttcagcaccactatcatcagc

SEQ ID NO: 7937 - DNA, 17 bp, Artificial Sequence
  Synthetic oligonucleotide
  Mismatch hsa-miR-4294 MIMAT0016849
ccctgccatagactccc

SEQ ID NO: 7938 - DNA, 23 bp, Artificial Sequence
  Synthetic oligonucleotide
  Mismatch hsa-miR-512-5p MIMAT0002822
gaaagtgccctcttggctgagtg

SEQ ID NO: 7939 - DNA, 23 bp, Artificial Sequence
  Synthetic oligonucleotide
  Mismatch hsa-miR-191-5p MIMAT0000440
cagctgcttttgaaattccgttg

SEQ ID NO: 7940 - DNA, 20 bp, Artificial Sequence
  Synthetic oligonucleotide
  Mismatch hsa-miR-1976 MIMAT0009451
acagcaaggtaggcaggagg

SEQ ID NO: 7941 - DNA, 88 bp, Artificial Sequence
  Synthetic oligonucleotide
ctagcatgactgcagtacgtgatctcctgtcatgattccaatttttccacatcttctgtctcttatacacatctgacgctgccgacga

SEQ ID NO: 7942 - DNA, 88 bp, Artificial Sequence
  Synthetic oligonucleotide
ctagcatgactgcagtacgtgatctcctgtcatgattccaatttccccacatcttctgtctcttatacacatctgacgctgccgacga

SEQ ID NO: 7943 - DNA, 88 bp, Artificial Sequence
  Synthetic oligonucleotide
ctagcatgactgcagtacgttgtcatctcacctgattccaatttttccacatcttctgtctcttatacacatctgacgctgccgacga

SEQ ID NO: 7944 - DNA, 88 bp, Artificial Sequence
  Synthetic oligonucleotide
ctagcatgactgcagtacgttgtcatctcacctgattccaatttccccacatcttctgtctcttatacacatctgacgctgccgacga

SEQ ID NO: 7945 - DNA, 64 bp, Artificial Sequence
  Synthetic oligonucleotide
gatctcctgtcatctcacctgattccaatttttccacatctttgtagaaccatgtcgtcagtgt

SEQ ID NO: 7946 - DNA, 64 bp, Artificial Sequence
  Synthetic oligonucleotide
gatctcctgtcatctcacctgattccaatttccccacatctttgtagaaccatgtcgtcagtgt

SEQ ID NO: 7947 - DNA, 15 bp, Artificial Sequence
  Synthetic oligonucleotide
tcgtcggcagcgtca

SEQ ID NO: 7948 - protein, 8 aa, Artificial Sequence
  Synthetic peptide
DYKDDDDK

SEQ ID NO: 7949 - protein, 9 aa, Artificial Sequence
  Synthetic peptide
YPYDVPDYA

SEQ ID NO: 7950 - protein, 10 aa, Artificial Sequence
  Synthetic peptide
EQKLISEEDL
